United States Patent Application Publication US 2024/0065297 A1 - sequence listing, part 7

SEQ ID NO: 16 - DNA, 1006987 bp, Pichia kluyveri
  >NCYC246_000005F P_kluyveri_NCYC246_TS
acttcactataccccccctgcgacctacttcactatacccccctgcgacctacttcactacttcactacttcactataccccccctgcgatctacttcacttaccccccctgcgacctacttcactacttcactataccccccccctgcgacctacttcactataccccccctgcgacctacttcactataccccccctgcgacctacttcactataccccccctgcgacctacttcactacttcactataccccccctgggaacaaagctaaaataaaatgaatgaagtacctagttaccttatcattcacaatcaacactcttggttccaatttcttgtttttggaataagcagacacaatgtgcagatatgatttcccatcagcaggctggtaaagtttcataatagtgcccaaattgtccatattgaaataagacatctcaaacattctgtaacttccaccagcggaaaaatgtaacatcaaaagcatcgcagcagacattcccgaaatagcatcccaaatcttctgtaaaacaactggattagaagtgtttactggcttgtatctcttaacaaaaacagtatttccatcaaagcaattatagaaagcattcttttgaggtttgtatttggatataccaagagtagaaacagattgaacagaatcaagatcaacacccaaactaaataaatcagccatatgtttatcatattcttcgaataaatggttgtaacaagacaacattctttctttactaaatgaaataccatcaatcgaaatttcaccatcatcatcaacatggatttcagtattagtagtaaagtcagtaactttaaaaacaccatgatagacattcttaaattgcttgaaatgtttgttatcatcttcaataaacaaagtagaaaattcatggggaatctcattatcatcaacaccagggggattaaaaataaataaatacttcatcatgaatttaacaccatccataacttttaaacagtaggtgtctttttggagtccataattaagatcatcaatcatagcagctttaattggcaatgtaaacatattggcatttgcatcgttcaaaatgtcccagagaaattttctaaataagaccattctttcttcaattttttcatcatcgattttgccatcaacatcatagatatcagcaagattttctcttaattcagtagatctttcaacatattcatctggaatattttgattagtggcaaacttatcgaaattgagaaagtaatagtatacttttttcatatatgatgaataattgtaaaatgtagttaatttatgataacctaaaactgttttcgatttgttaacatcattttcatcttcaggtaattgaataagaccagctctctttctataattccaaaaagcatgtttagtaaactctaaaatttcagttctataacttcgaaactctttatcaaaatggtactttggcatctcagtgaggaaagttgtgatgttatacattgtctctaaggtgtggacataatcaggtgagacacgtttattttcaacagcataagcagaagaaagacaacctgcagttgggataattttctctttatctgaaaataaataaacctgttgttttttagcattacgaacagtgtaaacttttttcaattgagatttattcttaacaaatttcttggtgacaacaagatggccgttgactctagtaacatatttatttctacttttaactctatattcttctaacttggtacaatcataagcaaagacagaagcattaggtttagaaaacaactcgttataaaacaaacgagagtggaataagtcttcttcagatgcatctttaacagtatcaggatgcgagatgtatcttccacctaaattaataacaacgtcattggcaataacacggcatttgctgaggacaataagatctctaaaagaaggataagtggaaacattatcaacgggtggttcaatttcaacatcactattttcatcaataatagcagcagacataatggtttttattttatggagaaggaacaaaagaaaagaacaaagaagaaaaggaagaaaaggaaggaaaaagaaattttaccagaaaacgaggatcttcaacggtttatatagatccgccaggggtaaaaacaattaactttccttggtatttacaaaaggggctggtttttgtttcctcggacataaaagtttacaagtctgaaaataattacaaaggtagctggtttttgaattgataataagacataaattaatattaagacataaatttattaaataattaaacagataatatacagcaaaaaaattggacagcataacaccatgtaaaaagctaaaattaaccactaaaacagcacccaaaaaccaaaaattaacaaacagaaaagcatcaaaaagaattaaaaaagaaacattaattcttaaacagaccatcaaaagaattaaaaagaaaaattaattcttacaaccaccaagcaagttaatagacaacacttgcaaagtttaaattaataaacataccataatcacaaaaataccaaatcaattactaagcaaagtccagcaaagaggtgtaagttgaggatacgagtataatcaacactgtggccatattatcattccagagcgggccctttccagaacaaaaaaaataaaaaccagagtccggaatgaaaccattcataacataggatgcatcactatattattgacatgattgcaaaccactcacagtctttcagaactaaacttgtaactaatcaataccatgtgcttgttaaaagaattaaaagaattaaaagaaataaaacaagagaaaagtaaaggaggaaacaggaagaaagagaagaaaaaagtgaactgaaagtgagaaaaagtggacaagagcagacaccccaatatatagaagataagaaaaatttgaaaaaaaattgaaaaaagtgcggataaggataaggaaaattttgaaaaaaaatggggaaaaaaaagtttgccgcgagcacttaattttcctaaacaggtaattttgccaaaaagggttaagtaattgaaaaacagtcacacagtagtgtgcggtgtggtgacgtataccctaaattattacgtaagcacaaaatttttaagatgggcaatgtcacacagagaacaaagttaattaaatttatttcaaaaaaatattacgtaatcagaccctagtatagtacctaccctctacacagtgtaaaaaaattaccttacaaaaaatattacgtaagcaaaaagtggaagcagctggaaaaaatagccgagccgaggggtggtgtccgcggccgaaaaacaaaaatagccgagcaaggtctactttttccaaaatgctttcagtttctatggattcagacacttgtacacagtgaagtggggatataattttttttagtgcttctgtctatgggaacatgttctcctgtattttttatacatagtgtaagtggaaaaagaaaaaaaaataagccgtaaagggagtaacagccagagataagaaaatcagataagcattctcggacatcggagtagctatctcgacaacgagccgcctttctggcattgttaaacctgttacaccataagtggaccctggaaatgcacccatgcattagaaagaagccaaaagtggtctactaaagaacatagtaattaacactaaaacagtaaaatactaacatacccgtatctccacaaccacaccacttttccactatgtaaaatttatttaccatacaactgactgtagagaacacatgcaagctttaaaaagcaagaaattagctgtggtacataatagccatgaataggcggctcagctgtttacgacagatttcagtgttgctcacttaggggggtgtatctcgacaaccagaccacttacagactaaccactcacatagttttgttcgccgtgtcaaaccgagtcagaccagcaacagcacaaccaattatctactgacattttacaaaagttatttttgaaaatacaatattttgacaaaaagtcaagtaagacatgaaaaaataaaaaataaatacttcgcactactaaaatttccattcggttgaaaaaaaacgagaaggacctgtaaaaagaaaccgaatgtcaaaacgagatggcccgcgctagaaaaacaaaaatcataactacgtccattccgtccgttttcttagtgtttttacattatacactatatggtgaaacttttttgcacattttaggtatggtttgttaaattaaaccaaaatttttaaaaggtaaacaactagcaactgaaatggatacatagacatcaaaaactactatagtaacaatttaaatcatataatgtttaataagtggcatataaattaatgaaatcttgtatatagtattgattaaatatacgttatatgttctataatctctcattcagttaacctattaattaaatgcatcatgtcaattatattaaacttaattatttgatgttctcagctaatttcaactattattatgataacactatagctgtttatacatttcttttttgtatgataaattaatacatcactaagttaacaactaattgtacctactattgactttatatatttttctacaagtatggtactaaagtacgccgttaaaagtgaaagatatattcggtgtagttgattactactaattttaattaattctatagtatggatagtgaattatacaacacaaaatatttggtttattagatatcgagtgactatagaaactgaataaatcaaatttttgaaagtcaagctgaacatttgacacaactttattacacaagaaaacattttatgctacaaaacatagcactataaaaatagaatttatcttgttcatgatcatatacgtttgagttcaaaatcgtattatagaaaacaaatgaaaagtgaaaaattatgtatctatatacactttctatctgagcaattaatgattatgctatagacaacatgtaatgttattgaccgactactgtttctattattatatcagtaatcattaactattctggctcatttattattaacaattttgttattattttcaataacaagattatactattatgggtaaattaaacagaataaattatatctcaacatgccaatacattccttaattgtctatcatcacaagactttgaaatatctaaaatgttttatcagtaactgtataattctttattaaatttgtacccatagtatgtggtttctgcatataataaacgatgaactaaatagtggatatgtttactcaataataaaacggtacatacatcaaaaagaatcattaattgtatctatcttaatattaaagactatgaggtaagatgaatacattgaaactaaaaaaatgccatgttaataaataaaatagaatattcggctaatcgtcatatgtataacatgtatttcggctaaagtcatcactcatgcgaagaagttaaaaaaataaaaatttaaaacattatccgaaaaccaaaattacccgaaaaatgattgtcatccaaaataaaaaataaacgtttagccgaaaaagcgaggagtttttcaaaatgttttgaataaagaataaactattactattaatgtttgttaatactgaactattattagttgttagtgattcacatatagttcaatgtattgaatattgttttagttggtaacttatacatttataaatgggaataagtaaatatattataatgtatgtttacacaacttaactattaattgtattagtttttattcatttcaacctagatcttgattaaatattcctttataaacctcaaactgcttaactgtagtagtgtattggtaataaaacacaagtaatatcatgtaaatcattgtttttataataatattcagtattattggatgttgttgttgattatctcaatattactatatttaagttaatatttggatatattaagttatattaatcagtagttaaaatgtaaataacagatactaaatctactgaattttaagtaatgtttaagcttgaatttcaaaaatagaatcatttagtattgaacaaaaagagcatgtatttttagtaaatataacaaaaactgcatattggtaaaattattatactaaatgttttcttttagctatataaattatggatattggtaaaattattatactaaatgcttctagtaatgggttcatcgccagacaagtcacttaaataaaataatttcatcatttatattccattaataatcgatgtgtcttttttatatatcattttattcgtgtccaaatatcacttcactagataaatcccaatttattaatatattccaatatttttttattaactggcttggactcattgatgaactaacataatcctcaatataaatactaaaaagatatttggatagtttaacttcacattatatagctaatacattcgcttcatacttgaatacttttttcaataataatttatatgtaatattgggatttatgttaataaatttgtgctattaatctcccgatggactaatcatatattcatttgatagtatcatattaattccaatggataagagtaatattacatcaattattcactacacttaataatcaatttatttaaccagttgttaataaaagaaccaatatccactaagaagaacactctgacaattaacatgttgaaaatatttactgtgtgagggaagttctcttaataaattttaattaactgttttattaacaactctttctttatggacgaattgaagagatataccatctatgatccatatgataatcaagtctcgtggaataatacattagttaaaattattaactctggtatcatgaggttttatcatttatccaatagctttacacttgtttaactataaatggttcaatttattagttattaatacaggaccatcatggaaattcattatctaattttccatcaactaatttacatggttcacttatcaaaacttcatctagcatgctgacttgaacaattcatcctttaaattttcattcttattcactaaaattagattgggttttttatttatgatatagattgcatcaattaataaaatattaacatctgcctgctttattcattactacaaaagcatatcataccaataattgtactatatttttcaaactgtttcacaattgattatttaaattcagtgtatacctaaaattgaagttagtgaattatttactataaaatttaaaccaccgaataaatatccaatattcacagattcattaattgtacagcctaattttactactaattgacatgttctaatgacaagtggatctatagcactataaaaaaatgccaacaatttacctccaagttagtttgaagcttaatgttgcaaaacagaggagttagaaaactgtcgtatttcgttgtcaacttcaaatagttctaacttcatctgttcttaatctttttcaactcaacttacttttatgaattcagcatgttttaaatgacaaaccttgataattaagataccgaaagggacttttaacaatttaattgctaaattgccatactaatttttgaagaataagaaggactttactcgttcagttttgaatatcaaaaatggtttacgtgtttgcaattattacaacgtactaatacaacatcaaactactccggttttaaaatcattaaaacaactattaaaaggctaattttaaaattttaaaaaaaaatggtttataaagtgatattaatagatcaatactatgtctttctgaataaaaattaatagacaattattattaattacaaacaaacaaacatgtgtatcaactgattcatataaacgtgtagttattgtaataatatatacctcatactaaattttgaaaattaaagttgagttttttcaattagtttcaattattaattaaaatgttttgttctactacaattaatacagtgtactaataaaacatctaactaacctgagtttaaaatcattaatccaactatcaaaaagttaattagaaaatcttcaaaaaatgaactttaaaacatcataactttaccaatataacatctttttaaataataattactactacatgttaggaaagactaaataaacaaacgaaactagtttcagatcattacaaagacattgataatttaattaagttattgaagtgagttgaagatttgaactttcaaacaaataaaatggacaaagtaattacatattctgattctccaatacacattgtataataatcttgctagctagaactctgtatcttatgtataacccataaataacatccattaaaactattaatttaccatactaaatttactatgtgaaaaattactatggtgagggtattaagacaacatggggtatgtcatatattaagaggttttgtctactattgatgatttcttgttatatgaacgctatttggataataataagcatatataggatactaattgtagtgaatatcaatatccaagtcaaagaatagtaaaaaaagcttgattaaaggagatatggcaacatttataaaatgaagagccacctaaaaagtgaaaaacagtgattttagagaatgacaaagtatcaaatgaaaaactacactgtaataagtttataattacttttaaaaaatcagatatcatcactaaaggtccatttgtgatatagatcaacaatttaaaattatagtcacaataaataagccattaattgaaaagaaagttgatttaacatactaaattactatggtgaaataaacttaagaatctaatttttaaacaattaattttagcaatctaattacatattcatcttcaccaatacaagtagtataatggaaatgatttaaacatactgtatgaattttacatcagttttaactaaatttctttttaatagatcataaatctatgctagaatgacatattgtttgggcattattgtcttaaacctttcatcattattatacattacatttaaaaagaaaacagaataaaaaattaatattttgataaaatgtcttggataggattttaaacctttaacgaggaaaacaggtagataattaactgttaataatgaactcttctatattttaaactttttataaaatgtactgtattataaatattatgtatctttgaatgaaaaacatccacaatcatttaataattatttaaatgatttattcattcaaagaaaattaaaataaaataacccaataggaactaaaaggctatcaacataacgaaaacaatttttgtaatgcaaaatgttactatgtacaaaatcataaatattcactatacaagaccatgacacaagcatcgataaccatcaccaggtgtcaaacatagaatcagataaatgctgtataaattgcactttcttcaactgaaacaactcttctggaactcccttcaattcctttttgtccaaatacatttgaaaaatagttaacttagcaccctttggaatcctttccaaagcacattctcgacatgagccaaaacaatttctacaagttccagcagaaacatataatggtgttgaataaattggatcttcagtaaacatttgaacatttggataaagttttttatatttgtttccccaaccatatgatctcaacttcttaccttttcctttataatatcttttccatcctttatcactttttggagactcgatttttttcctttggtacttaatgaaattgattgtaatcattttaaattcttttaaataaccagaagcttttttcaatatatccaacccaatcatgcctattctttctttaatatcatcaggctttattccttcaaaaatggacaatacaaaaactgcacataaccaaacaatatttttttcatctggaacaacacatgataaatgtacaagttcagcaaaagaacaaataaacattggatctttgaaaacatgttcaatcagcaaataatcatataatctataatcgtcactctttatctttttcaatattggaaattccttgtacaaatcattgataccaatcagatgatttctaacattcgggatatcatcatcaagaacattattaatatcaattctaaatgcagtatggaagtaatcaattttcttgggcaaagcatttctaaacattaattcgacttcagcatttgaaagtgtatccattaaatttaactcattaaaagaatttttatttgaagattctaaaaaattgttctttataacaggtttaattccaatacttgaaaaactaccagctttatcaatcaaagtttttgaactatcattcccatttaattcattactggaatttaatgcaggcatcatattttcatcaacatcttcaatcttacgacgtttagatatgtctactgattcactaaataaattatcattttgttttccagacagtttatcatcactttcaacatctgaaaactttcttttattagtttctatttcatcttcaacatatccaaatgaaaatggttcagtaattacctggctaagttttttaatgaatttatcgtcaataaaatgattacaacagttttgatggcctttaggggtaatattgtaaaacttttcaacttctgatgtacgacatataagattttcatcaaatatcaatatcattcctttgaacttaataaaatttaaaatttgtatgaaaatttcaatcttaggattatactcatataatataacaacttgtatattaggtatttcaaaatcattcacattatattctgttgtaatcaaaacacgttttcttaggatcattttgaaatttattcgtgatagaagtttcatcaatcgaatcttcaaataataaaagagaacaatctgaattaactgatgaattgaaattatgatataactcatgcagtttatctttattatcactaataacaacacatttccctcttgaatgagacaaaaatttaattagtatatttgttatttcatcttctatattattattattattatcattatcataaatcatgttcttaatctgtattctatttttgtatgggatttcattatatattgaccttatcttaatttcattatttaatcttaagactttgcgtaaactttgtgctgtatctgcattcattatatgagacatcatcaatattcttgaaaatctattaaaattgaattctatggatgattctctaatgtttggcttatttttttgtattaattgatgacaatcttgtaaaaacaataaaccaggttttgaatcttttagtaaagtattaagatctgtatccgattgataagaacctatataaacatctgttgaaggtataagtccattattcccttcaatatcaccaacagtgaatccatgtgatattaacattgatttgaaattatgttttgaagttgtgtaaggaagtaaaattatattaattaaatcaggggattgtttattcatagctttcaataatgataagacaatgatcatatcgtttccaaatgatgttgattgaatataatactcaccatcattatttgcaatagctttaagtagattaatttccatatcgtttaatgatgaatttggaaaaagtttatctttttcttccattgatatattaaaatatggaatattaattttatgacatgattgatcatatatagttttagctaatcctttaagttgaggtacataataatcaaaaaatggcaacatataacttctttcatcgctccaaagagtttttaaataaacattttcatcaataatgtatattttatcacctttttcatttataaaagagaacatttcaaaaagttttgaagtgggatgtgttgaatcaagtttcaaatatttgtctccgcttacaacattctctttaacagttttgataccatattcagttaataaattacatctatgaattaacactctatcactatagttattagttatttcatcacagaatgacttagcagttttaagattagttaaattttgaggtagtataggatcatatggattcacacaaactttatttgtcaaatccacagctatatagtccaagacggcatatctaggttcttcatctatagtcatctctgtagaaactcaaagaaaaagaaagaaccggaaagaaactcgtgattatttccgttgccactcgaaaaacatgttgtcagttttaatgaggcgtttgatatatcttttcttttctttttacttctttcttctttctttcttttgtagatcaatagacaatgtctgcaactatcaatcgttcattaacaactattaaaacagaattagaattcttatctgaatccggtgtcataactgaatctctatgtgatcatataatctcattattaccagatcgttatgtcaaagggatgccaatttccgatctcaaagattcctcaaatacaatttcaaatacaaataccaaaccattgattcaattagatgatagtgatagagaattcaataatgagaaacaagtaagagctccaccaccttctgctccaattaaggcaccacctgttgaattatatgaagcattatataattttacacctcaacaaagtgatgatttagaattaagaactggtgataaagttattgttacacaaaaattatcaaatgcttggtggaaaggttctgttaatgggaaaagtggtgtcttccctgctaattatgttacaaaatatgatggttcatcaacttcattagttgaaaaggaaagagattttgatccagtacctcaacaatcatcatctcctgctccttcttattactcgcaacaaccaccacaacaatactcacaacctccacagcaacaacaaccaccatattatcaacaacaacccgctcctgctccttatatgccatatcaatcaccagcagtggttcaacaagctccaattattcaagcacaacctcaacaagtagtttatcaacaacaacctcaacaacaatcatcatttagtaagtttggttcaaaattaggtgatgcagcaatctttggtgcaggtgcaacgataggttctgatttagttaatgcaattttttaattttaattattagttcatttatatcagttatttcataagttcttttacaaaagggtatactttctttcatcaataaacaacatatcataatatataatatatacacatataaataataaaataaatcttaaatcataatgtatatctgaataaaacattttccttatctgttaaatcagcaaactcataattatcaaaatttaaagcatctaatttaccttcactttgcaatttatcccttctcttattttcagcccaataattataataaatccatgaaataagtacacttgaaacggccaatgaaacaacaattgcaatttgtccacctctatattcaggtgcttgatcatcaataaaagtttgaggaccaattaaattaccaacagaataaccaattaaatataatgcattaacagtaattttttttgtatgacctgcaacatttgatgtaaaacatgataaacaacaaatcattccaactggacataaattatataaataataacctgcaattcttgcctttggactttgctttgcaaatgctaacatacaagaagcaattaaactgaaaaaaacaacaccagttgcaacacctagtttatgtttaaaatatttttgtgaccaacttaataaaatacaacctgcaaatgtaattgcaccagtaattaaattcattaataatgattgagtttctgaatatccaaaagtatcattaaataaaattgctgcaaagttagttaatgaaccatttggaatttgaaatgcaattgaaaagaaaaagaaaatccatgtattaatatctaaaattgcttctttaaattggtgatatttaaaatgtatattaccaaaaccttgttgattagttttaattcttaaaacaacttctttcttttcttgtgtgtttaaaaaccatgctttaactggaatatctggaatatggatgataaaggtaaatccaatagcaattgtcatacaacccataataataaataaaactttccatgattccattgaataagaatctggtctaatagctaaaccataagaaattgaactacctaagataacaccaataccattaaaagagaaccaaattgcagttcttaaaaattgttcttcagctttataccattgacctgttaagataaccatggctggggtaacagctgattcaaaaatacctaataaagttcttaaagtaataaaacctgcataattagcaggagttgcatgtaaacaaataattaaaccccaaagaataatattaattgaaacaaattttgaaactgggaatctttgtaatgctaaactcattgggaattcaaatataagataacctaaataaaatgctgaaccagtccaagaatattgattaccatgcatattataataatttctcaaccccataattgctgcaaaacttgttgaaactttatccatatattgaattgcatataagaaagaaaccaagggtagtaaaaataaatcaattttccaaagtaatttacgttcaatttcaggagttaaagcaatttgatcatcatgttctgcatcaatagcataagccattgcttgatcgacatcaccagtaacatcaacaacattaccatcaatggatttaatatgagttaaaacatcttcattgccgatattttccttattgaatgaaactatatcagaaccatcattatcatttctaatgtgagtattttcaattgaattgttagacgattttgaactcatttcggtcttttacttcttgtagaaaaaagagaaagtagtattaggttgtgtgttatattataaatttatgggggatgtatattctttttatataacacaatagccacaatttgaagaaataaatgagtcaagttgtggttgataacacattgccgtgtattttatgataaatattctgtttaaataaaataaacttcattaattttccaagatgaaaagttcatcaacggttttctgtcagtgttaaatattaatgcccatcgattttatgtcataaagaagaaaaatctgccataacgccacttaaaatttctttttcagggtgtagcactaatccttttcgcaatttcacgtgatcgacagtcacgtgcttttatgacatgccatttgttgtgtttgagggctcatttgccatttgaagtatctttttgtgttgtattgataatattgttgatataattaggttataatggtacctatatctactctatatgtatagtataagtgttagtaacatgtttttgtgtatataaatagctttcaagaaacaaaaaaagacttcaacttttaatataatatttaatttatggtagtttccaaatactgtaatttacctaataaatgaccaaattatcacccaaataacttctagaaaacatctacaggttatattacactgaaatacatctcaatacaatcaaaatacatcttccttacctatcattacactttaattggtcatcaaatggtaaaagaaaatacaatcactcaatctgcaacatgagaaattcaatttttttttaatttttcctcaattaagctaactaattttgcattttaccattaaattccttatcttgatttcatctttaatttatctttgaaatagtattctcaatagatataactgtcaaatgactaagaaagaatataattttaaaccaattaatgtcaaatatgttggtagaactcatttagcatgtcttaattgtcgtgttcaaaaaattaaatgttcaggtggtatgtaattagatttaaaacaattctttttaatcagaaattaatatactaacattatcattatcattattattataggaccttctgcatgtaaaaacttgcgtttcctcaaataaggaatgtaaatatcctccaagagagaaaaaagtaactcttttagaatctcaattgaataaacttaaagaaagaataatatttcttgaaaatcaattagaaaatgataaattaagacaaatagtataaataataataatagtgataacgataacgatacttatactgataataataataataataataataatgaaattactgacaataacaccgataataatacaatcactacatctaatgatgatactaaagatgatgaaataactgattaccatagcataccctttgattcaacttcaaataattcaagttatagtcattattttggtacttcatcaggccaagtttttgattctgaattgaaatctcatctatttgaaataactcaagatgctgataaattatcaccaaattcttcaccttcaactcaacgtcgacatttttttaaagatccaacattagaattctcattctctggtgttgtaatgttacctgataaagaatatgcattatcattggttgaaaaagttataaaatttttaagtcatgaatattatttatatgatgctgaattattttataaacaaattgatgaagcttatgaaaaattaagggataaaaaacctttatggatatgttattttttaatgactttagcagtcggtgaacaatatttaagtcattctccaaatggtgaaataccaggtatgggattttatattgctgcaatgagattatataaatcaagttatgaggaaccaacattagaatttgttcaattattattattaattgcattttatttacaaggtttaaatagtgcaaatgctgcattctcattttatggtttagcaatgagatctgcattaattcaaggtttacatagaaatataaaatacttaccaccaattgagagagaaaaacgtaaaagattatggtggactgtattcattatggataatatatggtgttctaatttaggtcatccaattcatgttcatattgaagatgttgatgttgattatcctcaagaaaattatattgatttgaatgatgattttaatatcgaattaatgcaatataatgttaaacttgcaactatacttggatcagttatgaaagatgtttattgtccaactaagggtaatccttcaattaaagttaagaaagttttagattgtgttgatagattagatgaattaagaaatatattaccaacaagagttaaaaataatttaatcctttcagataatagatcaactgctaatttatatttacgattaaatcaatatacaattgttacaactagaccattattattatcattatttaaaggtcatgttcaaccgacagatccaattaaaaaagttgtttcaagatgtgttaatgctgcaatttcttcaatcgacattttaacaaatttgaaaaataatgactggttatcagcatttggattttgggatgcacaattttgtttctctgcattaataattttaactatttgtagttttgcaggtaatgtttatacacaaactgaagctggtaggaaaattaataagtatatgaaagatgcaggaaattttacagccttagataatgaacataaacttattgaattagatgaattattatctaaaattccaacttattctgcaagttttagaaatagagaatctgaagaagcaaatgatactccatctgaatatgaaaataatgacaataaaaatgatcacaatgaagttattgaaactcaaaataaaaatcaaaatcaaagtgaaccaaatttaaataaagatccgacttcaactacaatgaatcctcaaagatcaagtcataattcacattttgaaaatgaaaatagaagaaacgttgatcaacaagtgaataaaataagtcctccaaatagcatggcacttgattctgaattacaaatgagaaactctattgcatctaatggaaaacaaaacattccaatttcacaattgctaataccttcaaccacaccagataacatatcaccacaaaataaaggacaacaacaattttttaataagttttctcctatgggtaataattcaaactatactaatcatccaacggataatagtttcaatacattctttaatgatatcaattcaggtccaattggtgattttacagcattccgtaataatgtttcgccagatacttggaatgaattaactacaaatttacaattttgggatccagctaatagttaggtgattatatccttgtctttacttataattgttatatatcctatttgtattatacctttaattttgtttagtattgattatctacaaaattatcattactataaaatatgaaatttacatagaaaatttgatcttcggaaaactcaatgaggtttcccgaattttcacatatttttctaaaacataatcaaacgatctttatcagctatatattacaatcaacatacaccattaataaatatgattcaatgaatataatatatctcaaagtactggcatgatatttcattatagaaccactttttaaagtacttgtttaatttgaaaagaatcaataataattatcaatccggtcaatcattttaccattccgagataatcgaactaagttaccattctcccgattacaaacttgatatataaataaaacaatcccagttttttatcaaacaattaaacatagaataacttcaacaaacaaacaaaaatagaaatagaatcaaaatgtcaaaacaaatagtcgtcgttggtgcaggtgttattggacttacatgtgcatggattttatccgaaaaaggttataaagttacaatagttgcaaatagattcccatcaacttttaatgatgatatagattatacatcaccatgggcaggtgcacattttagaccattcccatcaacaaatgaaggtgatttaaaggatttcccattaacaagagttacatttgatgttttaaaggaaatttcagcaaaatttcctgaatcatcagttaaatttatgaaaggtattgattatgttgaagcagatgaaaaattatatgcaagtttaagtacaggatatgcagaaggtttaaaaaattttgaaattataagtaaagaattattaccaaagaatgttaaatttggtgcaaaatatgattcatggtgtttaaattcaccactttatttacaatttttagaaagaagattaagaatgtattacggagttgaatttgttaattcaacagttgtttcattaaaggcaatttcacaaaattttccaaaatcatcaattattaattgtacaggattaggattaagatatgatggtggatatgactctaaatgtttccaagttagaggtcaaacattattagttagaccaccaaagaattgtccatataagaatatgactgtcacacatagattaccaggtggtaagtattcatttgttattccacgtccatttgatggaggtattattgttggtggtacaagacaaccgggagttttaacagcagcaactaattatgaagataaggaagaattaattaagaatgcaatggaaagattcccagaattaattgtttatgatgataatggtaatccaacattagatgttaagaaaatcaatgttggatttagaccaatgagacaagggggtgttagattagaaaaggagagaattccaaattcctccaatagtataattcattgttatggatttggtagttcaggatttgagatgagttggggtgcagcagaattagttcttaaattagttgaagatgttcaatccaagttttaatattgtatagaaatttatagaccttttaaatttgattttaattacaataattacttataaaatgtatggaatttagtacaaagtattgtttatataaagtaaatctattaaatccaatcttgaccacgagattgtcttgattctaaggaagagcagaataaacctctctttgaagttgttaaaccagtacgtactaataccagataataaattaacaccagcaacaacaccatcaataacgataacaccataaggatggacagcttcttcaacagcttgtttcatatcagtcataccagcacaacctaaaagaatacaatcagcatctttatcaacaactaatttagttgcaacatttttcataattgataaaacttcatctcttggttttgtatgtaattcagcaacttttaaaccagttgataaaagacctgcacaattgcctgataaaccataatttcttacaccatcatcatgtctaattgatgatctataaacagttgtaacaataccaaatctaccaccaataattctagaactataaattgcagcttccattataccacaagttggcatatcaaattcttctctaatacaattagttaatggatgatcagagaaacatgcaactaaacatgcatcagcttgtttaattaaatcatatgcatctctcattacatcagcagatgataaaacaccatcaagatgaccttcaacagtagttggaccagttgttggagcagtataaccataaacaattgcatctgcaggtaaatgttgttcaaccattttaatacaattaactgtcattaattcagtacaatttgggttaattagtaaaattttttgaactttagatggatctaataaatcaacacatgatcctttagcaaatggtaatgtattaaggtctttagatggtgacatttttcgtttgttttgttgtattactagaagatattttagagaacactaaacagaaaacaaaataatttcaggaaaaattttcagaactcaaataataattccccagtcaatccaagatcaagatcaagattaaattcaagattgaaaaacttccaaacattaattccaactcggatgtgaacataaactgaacggagtatagcaaacggagtacctcaaatacttctccatcaccaactgcaacgaatccttatcggtaagataagaaatcaattccgagaaaccttaattttctctcttccgtcggtaaagtttatgggtagggggtatgagggacccttaaattttatgatttccgaaggaaataatcgctaatactcggcattcaccgacttacaactgattgacaatctcttatctatgtatccttattggtgttttaagaatagaaaagagatatacgattactgtactaaagtaggatagaaatacagtgtaagtaaactcaatgaaaatacaaataaaatatttgatgaatgttacgtaaaaaaccagtataacagtctctattcggcaaagccagcaatgaaaccctaaacaatataactcgaatctttctcaactgaacctgtcaaagtaaaataaacatagctgtcacatataccaactgtaaacaactccgtccggttacccttgacatcttctccgtaatgaaactgttagcaaatgactattaaacagtcggtaaagtgtcactgctttcccgcgatgaaagacttctccaaaatttcacttatcagtggaaaaactatattttcaagccattttattattaactttaatctacctttcctattgttcaagtgacttattttgcctctgaaaaccgttcaaagatattaaaatagtactgatttatcaaatattggttcactatactgcactttgatagtttatctggaaaagtttcatttctgtattattattgttcttatctgaaagaatttatcaatttatttctttttcagataatagattcgattgataaaattatttctaatctaaattaatttagcccggatttgctatcttttgatccaacgtttaaataatttttgccatttcaatttatttataaggctggttagttcttctattttttctccagttcacatctacttcaattctattaatatttcaattatctcaataatatttttttttattatcattaaacaagaaattaatatatcaggaatatattaattacaaaatcacacacacatacacatataaataaataaagatggtaagtgcaacttggttatcaaacctaagtgaaaaaatagcaatccctgatactgctgctgatacaaatgaagattcaattagaagtaataaagatttagatccaactaatgtcgaaggtaagaacttggcaaacttataatttcttcttagtttggtttcaatcttcattaaatgttactatttggaattctggtgcttcattaattaaatcaactaaattagtttattggcaaacaatgattgcatcagttattgcaactttaattggtggtttatttgttatgtggaattcaagagctggtgcaacttatcatgttggttaccctgttttattaagagcaacttatggtgtttggggttattatttatttgttattattagaggtttcgttgctattttatggtttgcagttcaaacttattatggtggttgtttagttgatgttgtcttaagatgtatttttggtcataaatgggtaaatattccaaatcatatctcagaaagtcaaggtattacaactagattaatggttgcattctttttattctggttaattcaatggcctgtcattttaactcacccaactaaaattagacatttctttacattcaaggcaattgctttaccttgggcaactttaggtaattttcatttattgtgttgttgttggtaaaggtccaggtaattttgatcttggtataccaattgttactaaaccttcacaagttggttggaattttatgtttgcaattaattctattcttggttctatttcagctatgattattaatcaacctgatgttgctagatatgcaaagaagaaatcagctcctcttttaccacaatttattggttttatgttaagtaaagttgcaattcaattatttgcaatggttgcagttgcttcatattatagagtttctggtgaaacatattggagtttatgggatttacttaatggtatcttagatagacattggactgcaggtgcaagaactggttgtttctttgttgctgcagcttttggtattggtaatatgggtactaatttatttggtaatgcacttccatttgctgctgatatgactggtttattcccaaaatatattaatattattagaggtcaaatcttaatgggtgttatctgttggggtattgttccatggaaaatgttaaaaaatgcacaaactttccttactttccttggtagttatactttattcgttggtccaattttaggttgtatgcttgcagattattattttgttagaaaaggtaatttacatactccttcattatatacaagaagttctaatggtatttactacttctacaaaggtttcaatttatatggttgcgcagcttgggtttgtgcaatggcattaggtattccaggtttagcagctgcaattacaccaaccaaatattcagcttcttgtttacatatgaattatattggttggttaatgtgtacaattgcaggtattgttttccatacattattctccaaaataggtaaacctgcaatttaccctccaggccatgaagatactccaactacatttgaatatatggttccaaataatggtttctttgatgaagatgaaccaataaatggtgtttcatcaatgaattatcaaccttcttactcttcttcatatgaacaatccgatttaaaggatcaaactgttactgaagttatctctttagaaaacttaggtactagttcaagagattaatttaatttttacttattccttttcacttttgtatactgttttataatataattcgatagattcttttaaaatgttttctctaatattatcacactttttcaccataagttacatacaaaaaatgggaaacccctactacctgtaaaaatgactggattaccaatgcacaatatctctgaacacgattaccgagaaatatagtataatcttgataaggtccgaacggctggaaaaggtaaacatggcacttctgataagaaaaacggttcggaaaagtcgactttccaactccggtgattatcaccaggttccccgaatttgagtcggagtttcacaaattaacatcaagttctccaggtttatggactggattaactgagtgaaagatccgattatattactatctttatatcccggtaaattgagtggtacgaggaagacaaatgatctatgatttattatctccattatttatctgaatttaaatatcttacacttccctgattatcttatcttatattagattatcatttgattattcattatacaaacaaaagttagttaatttaattatacaatgtcaactactgcaacacaaacagcagcttccgttaatgaagttccagaaaaagtcgtcccagcatcctcaagaggttatgcaatgcaacaaagaggtgcatcaaatatggcaatgggtaatggtaatccacataaaattccagaatttgatgatccatacaagaaaagagaatggattttagaacatatggcaggtgcatttagagtttttggtagaaaaggttatgctgaaggtactgcaggtcatatttcagttagagatccagttgatccaacaactttttggattaatccattaggtgttcatttttctatggttacagcaggtgatatgattcatattgatgaagatggtaatattattggtggtaatactaaaggtacaattaatgcagctggttttgcaattcattcagcattacataaggcaagaccaaatattaatgcagcttgtcatacacattctgaatatggtagagcattttcttgttttggtaaagaattagaaatgttaaatcaagattcttgttatttttataagagtaatgcagtttatgctgattttggtggtacagctgttgaaaaggaagaaggtgaacgtattgcaaaatgtgttggtgatactggtcgtgcattaattatgcaaaatcatggtttattaactgttggtgaaactgttgatgaagctgcatatttatttactttattagaaagaacatgtaaacttcaaatgcttgttaatgctgcagaaaataggtaaatatgttaagaactttattggtgatagtgaagctgcatatactaattttatcagtgcagatcctgaaagtatgtacatggcattccaaccagattacaatctcgaaaaatacagagacaattctttcttatctaaatcttctttataaatttgtttaaatttagttttttaaattaaaaaaaaatatcacattcatgaataagctggtattagtcaattatagtatatcaatttaccttgaggttatcatcatacttttcaaaaaacaaatcgactaaacattattgggaatttattattatattttataaactatatctatctatctatttattcaaaaattggattaagtggtttcataggacctgctaaagtacttgcctttcttttaaataactaccaatttgaccaccaataacaccaccattatctctatcaaaacaaacattacctcttaaaattgtatatcttggccaattagtaaattccataccttcaaatggagtataatcaatactatgatgtaacatttcattctttaattcaaatttattaattttattctttggataccaaattgtaaaatctgcatccataccaacaccaattgaaccctttgattcacttaaaccatataattttgcaggatttgttgaagttaattcaacaaatttttgtggagtaattctaccagtttcaacaccataacaaaataataatggtaatctagtttcaatacctggtaaaccatttggaacatccttaaaatgtggtataccattaattaaacctttctttttacctaatggatgatcatatttggaaggtgcatgatcactactgaaaactgtaattgtaccattaattaaatgtttccaaacaccttctaaatctttttgagttgatcttaaaggtggtgaacaaatatattttgcaccttgaaatttatcatcatgattaccatgattacaacaatcatgttttaaattatcacctgtaaggaataaatattgaggacaagtttcagcaaaaattgggaataaatcagtttgagcctttttaacatgatctaaagctgattcacatgacatatgaacaagtaacattggaacatcaatcattttagctaatgaaattgcacgatatgaagcttcatcttcagcaatttgaggtcttgaaactgtatgatagaaaggttgagttaattttttttcagataatcttttattaataaaatcaattatatctgaattctctgcatgaaccattgttgtaacattattttttctatttgttaataaaatttgtaataattgttcatcagataatttatatcttggataagttgtataaactttaacagaagtaattgattccttttcaacaacttcagggaaactaatttctaacatttcttgagttggttcagaaataattaaatggaaaccataatcacaatatgaaccaccatttttatttgctctaccatgatattcttcaacaactttaattaaatcatattctttctttggttgaattgcaaatggaatcattgtagttgtaccacctgcaattgcagattttgaaccagattcaaaattatcacctgcaggtgcattatcttgatcaatatgaacatgagaatcaacaccacctggcataatataaccaccttctgcatcaatttctttcttacctgtaattttagcagttgttatagtttcaataataccattattaacaccaatataaactgattttggtaaaatatctgcagctgtaacgactaaaccgttataaatgactaaatcgtaggacattattaattatttattatttgttgtttgaagataaatgaactttttaggatattatttttaaaagaagaagttggtatgttataaacagaaatactaacccctatataccatatagatatcatcatatagactcctcccttccctggtgttaatcaaaactgataagaagatgccatgcaatcaacggtcaacggagaagttggtgaaatttaccggcggttgaatttttcaggtttccaacttttccattgtggtaataatatactgatagtaatgttagtggagaagggtatatcacagtagtaacgaggagtagagtagtagagtagtagagtagtagagtattagagtagagtatagtttcatatattaagcaataacgtaaatagagtatataggaaatgttatataggattataattttggagataaatctaaatattcagcagtacattcaagttcaactttaacttttggatttgggaaaccaacaataatacaagatctaccaggttgagttttaaaatatttttcgtaaactttattaacttctgcactatatttaccatcagcaataaataataaaacttttaaaactttatctaatgatgagccacttgcaattaaaacttcctctaaatttttaattgcattttcagtttgttctgcaacactttcagggaaattaccttgagcatcattaccaagacaacctgtgtgaaaacatgtccattagatttaactgctggtgataataatttattacctgatttattaatatctgcccatgtaattgtctcaatcattgtagttttgttactcaaatagggaataactagaggaagtacaaaagaaacaacataaggaaaagaagtgaaaagtaattaaaagaatttacaattgattaaagttagattgaacaatgctgatagtggtggaattctttcagaattgcctatttgggaagcttagccgccattggatcttaatcaacggcggataacaccatttttaccatataatcagtcgtataactcagtaaatggtagataatagattaaagactatacgccgtagtagctctgtgtcagaagacaattaacggagtaggaaagtaaaggaaaggaaaaacaataaaagggaacccgtttgatgttctccgtcgtatggtggtaatagtgataaactgctattaaaatactaagatctccataactataacggtttcggagaacttaatgattccaggagttccttaccaaattataataacggacagaaatagccataatgccaatgaaaggagaaaggaaaatacaataggaaaagtaactggaaatggaaaacttgaagatcggagaagttgaccaggtctccgaacaggtattatcttgttattagatactgatttatttatttatttatttatatataacctagtatctgtagaagttgtatagttagatcagtttactattcctttattaataacaaacaaacaaacaaacaaacagagaaataataatggcaggtgttagacaattcaaaattgcggcaattcaagttggtccaattgcaagagcagcaaagagagaagatacagttaaaagattatgtggattattatccaaggcagcagatgaaggtgccagattagcagtttttcccagaattaacattaacaacttttttcccaaaatggttaatccaatcacaagaggaagttgattcatattttgaaaaaggtgatattactaaaggtccatgtaaaccattatttgaattatccaaagaaaagaaaattggtttttatttaggttatgcagaattaactgatgatggtcatcattttaatacaagtatattagttgataatgaaggtaaaattattaataaatatagaaaagttcatttaccaggttttattgaaccaattgaaggtattccatttcaacaattagagaaaagatattttgaatatggtgatatgggatttcaagctgttagaactaatcctgaatggattgatgcaactgttggtatgcttatatgtaatgatagaagatggcctgaagcttggagaagttatgcattacaaggtatggatttaatgttaattggttataattctgttgctaatgcagttggattatttggtgataaggaagataaaactttaagacaatatcatagtgatttatctgcaaaatcaaatgcatattttaattcatgttttgcagttagtgttggtaaatgtggtaaagaggaaggtcaagatttattagctggttcaattattgttgatccaactggtagaactgttgatcaatgtaaaactgaagatgatgaagttattgttagtgaaattgatcttgatgattcaattattggtaaacaaaaaatgtttgactttgaaagacatagacgtcctgaatgttatactcgtcttgttgaacaaaagggtaccattccactcccaccttactctccttccaattaatcacactaatacaatacattctctatataacattccctttatataacaaaataaacttaataaagacctaataaacagttaatgaaccagcctctataatttacgtaaacattaattagacatgtatttatgtaattttcctattccttcatgtttcatcttaacaaccacttgttcttcctgagttggacacccccaatgagccatttcttagataatactgacccatgggccaatgatggactcccatcaacagctaataatttaaaaacaacgagtaaactagatcaattagtatcaaatatcgatattggtgattcagtgatgaatatatttggacaatcaacaacatcttcaatacttgattcaatacatgaacctaatggaattttatcaagttctaatagtaataattggggggattacaattcttttaatattcttaataaagattcaggtaagaggtcaacaactagtacgacttctaaatcagtttccactccgaaggtatcatcatcatctgtgataaatactattcctggtatattggaagaagaaggagatgaaaattatgaacatgataatgataatgatcaagatatgaatgaatatgaacttggggattctgttcatttgaaaatatggacagatgatgaagttaagaaattcaatccattaacattgaaaaactctaatgatggattaatcgtacgtgtacgagagatacctgaaaaggaaggtttagttttcaaacatatcaattatttaatatcacatactatcaaatacagtgaagaatatgttcaaaatgatattaataataataataataacagtaacagtaataatggtgaaacaaaagttataagaagatacagtgattttgcatggctcgttgaagttttatggaagaagtatccatttcggttgattcctgaactaccaccaaagaaatttgcatgtaagtaagaagattatttgtgatttttattaaacaatatactaacataattatagtagcttcatcaaatgatgttttatttttacaaaaacgtagaagaggtttacaaagatttttatttcaattatgtaaacatccagtattatcaaaggagaatttagttataatgtttttaacagttccaaatgattttaataattggaaaaaatttgctaatattgaaataaatgatgaatttaatggtattagattaaatttacctaaaaggtttaaaattgatttaactaatgtattgaagggattagttgatgaatatgaggaagataattatgatgatagtacagatatcgatcctgaagatataattgataataatagacagattaatcaaaatcaacatgaattggttattaataatataaatcaaatatgggatgaaaatccaattaaatatcaagagaaagattttattagtaatattggtaatattaataatattttaagtaaagtagctgaattatggtcaaaattatatatattagttgaaaggattgaaaaacgtgaaattgcattatcattagatcatcaaagattttcaattattttagaaaatttaattaaagttgataatgatttatttggtattaataatttaactaataatagtattaatgatgaaggagaacaacaaaatttgagtttaattaattcaatattatatcaagtaagtaaatattttacaaattttaaaaagaataaggatgaagagatggaattggtaagtaatttaattttagagaattggagagttttccaagattatttaattagtttccatttccttattgaaagattttataaatttaagaatgaaagtgagagagagataagggaattattaaataatattattaaatgtaatgaaagaattgaacaattaaagaagaaatctgatattagaggtacagaagttgataaatatgttaatatgttaattaaattgatggatgatttaaatatgttaatttctagaataattttaacaaaggtaacatttattaatgaatttaagatatttcaaaaagttaaatatttaataagtgaagtattacaagattggtttaatgaaagaagtttatattttgataaacaaaatgatttaattcaaaatttagttaatgaattaaaggatataccattatgtagtgtataaaatttatatataaatataaaggattattattaattaactatgaaattttctttgaagcattattaaaacctacacctttacaagttgcaataagaacatcatcatattgatcatcttcttggaaataaaattctgtattaaacattgttttaatatctcttaataattgaactaaatgattatcaatttgatttttattaattatgaatctaccaatatcttctttaccaataaccataaatatgaaagccatatctaataaaaatcttggaattgcagcactattttctattatttctaaaaattgataagataaagattcagctaaatcttcaggagtttcaccacttgatgcgacatcatcaattatatatcgtaattgagatttctttgattcagtaaataatgttaaaccaaaaccaggagatttacctgaattttcacctctccaaacatcagtcgttatattaacttcacaaccagtatttcttaaaacttgacgagatgaatcaactaatctattaacaacagatggtgaaacacgagtacaccaagcaatacctctaattgaagagatatttggtatttccaacatatggattgtaattggttgagcaattaatgaattaactaataaatgaacttcaccacctgcatttggatatgaacctctctttaaagtatgtaattcaacatcttttataccgaatttatccattaaaggtataaacccccatttaataaaatctaatccaacttcacccttcattgatgttaaaccattaaatataattgaaaatttcttctttgaaaaaggagctaataataacattggtataataaaatatgatattgatttattagttggacaattatgagtaaatgaaccaccagtgattaaaccgggacgatagataagagaagtaccagtatatgatatttctataactgaaccattagtaattgattcaagtaatctaaggaatgaaatttcataatcctctaaacctggatttagagaatctgaacggatatttgaaattttaattgatttaccggataaagtggcaagtacaagtctagtggtgaaattctcatgtgtagaaaagtgtattattgaattggcagtattagacatgttgatctgatctgtggtattatctgtacaattcaagtctctttttcaatgtaaagtcagtttaaaaaaaaataaagtattttatttccttatcgggaaggtgaaataaaaaaaaaatttttgatgctgaaaaattttaaaaaacttttgaggtgcacggattatttttattttataagacgatcgacgctgttttttatttcagttcttgtcttcagtggcaaatcttagggctcattcagtattaattggtatattggaagagtaggtaggtgtagactgtaaggtatatatcattctgtatagcaatggactccgctgtcaactctctgactccatcatctgcacagttgtctgataataaagagaataccacctctaaggagaatccaacaagtaaagacaatacatctaatgacacgaaaacaccaaagaaacaacaacaacaacaacaacaaccagtaatacctactgctagtggtaatagtgctacacctacaccatcatcatcatcaacaacaacgaaacctgttaaaaagccaaccaataaatccaatgacaatcatgaagtattatctgatgcagttgcagcttcaggtgttaatatacgagctgaggaagaggcaatggcaaattcttcattatcattatctatatctaagaaacatattgaacaaaataatttcttaaaacatgaacaattaagttggtttattcataatatattagataaacaaggtattaaacctttaaatattgataatgatgtaacaaatttaatttcttcatcttgtgaaaattatatgtctcaaataatagctgatataattataatgatgagacatcgtagacatttatctgatattgttaataataataataataataataacaaatcaaagaataaaaaatcttctaaaaattctaaaaattcaatacaaaatttttcaagtataaataataaaagtgaaatatcaaaagctttaagagatttagcttcaaaacataaggaacgtgaagaaaaacgtataaggaggagaattttccttggtttagaagaggaaaaacctgttgaagaaattgttcaagatcataatcaaactaatttaactgcaaatctaatgatgagtggttctaaacaaaagaaatattcttggatgcaatcatcttcaaataataattcaaattcaaattttaattctcttggtgataatggtatcagatatagagaagctagagaggaaccttcagtagttatgagagatttaattgctgctttagaaaatagaagaatgggtgtatctgaagttttattaaaagcttatgcacgtttaaaagattagcatttgtatcgtatcgtatatatatatataaccacttgcattctcatttgtatattatattaaacttgtacatttatctcactattctgatctttctcttcttaactatccccatttggggtattactttagtatctacttcttcatcgtcatcactactgtcagaataatcattaaatatcccagctcttttagtactttgatgttttttaaaagcattctctgcttcctttactataacactatcatcttcaactacactttccttatcattattttcctctccattatcttctaatatcatcctcttcctctcaatttcgcccaaatgttcttgaagatcctctaattcctcaattctttcttgttctctctgttgttcctctaatcgtttctccaattgttccattgcattatcatttgataatttatcaattttcccatctaatcctttcttctcccttaattccatatcctttttcatcttctcattttctttaaactctttatccaatctactaatcatctcatcaacagtttcattcttcttcaccttaccattattatcattatcatcatccttttcataatttttcttacatcctttaatacatttataatcaccattttgtggatcagtttcaaaactaagctctgctgcacatctcggacatctgaatgtaaatttaatgatcgatatacttaaataatttctatctgttacctctttacgtgcattgaatttccttctctgtgaaatatattcattacaattcaaacatttaatagaaaacggcaccattaatctaatattaaccacatttcgagatttcctctgtttctgtgaaaacttcaccttagatggatcaacatccggtggataatacctattaacttccttcctactcataatacctgaaaaaagattgattgtgatagatcaaagaaaggattaaaattcatgtttaagtaagcgacatgaaaatttgttttgttttcgattttatttatttacctgtcttaagagaaggtgtttctttagctgtagaaggtatagaatagagggtatataaggaactatgggtatgttggacttggaagcagagactatggagttttccaaagattcaatagagatagacaatgaagattttgattttaactattcatttaatatggtaactgatttattagctgcatcaccaatgaatataattgataatgaaacttttaaaacttttaaacatttaattgcatatgttcaagatggtaatgaactaaagaaattatcatcagtttattttacattaaccaaatctgttcaatcagaaattgagataattgatagtcaaggtttggatattgacgcgtcagagcataaacaggtattgtatcattacatgtatttattattcatatcagtccatttcctagtaccattatttactcaagatgaaaagaataagaaaaaaatttctagtagtgaatttgagaaaaggaaaattgataccttaactacaatactctcatcattacttgggacattctgtgaattattaaatcatcaattatcaacaattatacagggtgaacaagaattgattgaattttgtgatgttgttcttaaatcagcatatgttattttaatgtcaaaggatacaattaaggagaaaacgaataaatctctcttagttagattattatgtacagttgctaaaaattatcaacaaaatgatcaagtctcacatagattaacaatggcattaccattctctgaacatttagctgatccaatagcagaaattatttctacatcggtaaaatattttgataatagaaatttcctgcaaaatttccttctttcattatcaacaatttctccattgagtacaaatttagctaaaaatataagtattttattagttaaattatctgaatatttaagcaccgatttatacaaattcatgaattcatttgaagttttcgaaagatcatctccaactgtacgtgctgcaacaatgatttgttatggtaattgtgttagttccttatcaattaatgaagatttaataactgattctaaagttttagacctaattgaaaatttagtggatacattggaaactaatttattagatacttatcaaatagttcgtcaaagatgtttacaagcattagaacttataatttcaaatgaagaatctaaattaaattttaagaaaaaatcatttcattggattttaatagcaaatcgtcatttagaggataaatcaagttttgttagaaaatcttcaatttcattcttgaaaagtataattaaatttcatccatttacaatgaatggtggtaaattatcttgggattattattggaataattatatctatttcactaatatgattaaagaaattgataatggtatactctataatagcattagaagaaaagaacttgatgatgatgatgatgatttaagtgaaattatagctcccgtagaggataaaatggatggtgttttcaaattaatacaaaatgattcaaatgatataaatgatgaattagatgctaatataattaataattatgaaactgaagttgctgaacttgtgttgaaaaggaaatattgtagagatgcatgtattttcattaaattattagataaatcattcatattagttgcaacattattaaattctaaattaaaatcagataatgtttcagcaattgaatttttcacagttggtgatgcctatgaaattgcttcaagtaaatttggtataaagcaaatgttacatttaatttggaaaagtggttcaaatgaagatggtaataaagttgttgaaaaattaattgaagcttatgtttcaatgtttttaacacctgatccaaatgcttcaaatgaacagaaaacaatttatattgctttatcattgattaaactaacatataattgcagtttagctgatttaatttcattggagaaaatgattgttgaactctgtaaaggtaaagagattgaaaaatcaagaaaggaaaaagaatcaagaaattataaaccaatgtatcaacattatataacacctcaagttataaatgttttatggaatagttttattaatgcaaaacatcctaaggagaaaaaaggtgcaattattatattaggtatgattgcaatttatgattataaggtgattaatattgaaatgataattaatcatggtatggatttaaatgatttaaatgtttcaggtcgtttagatgattcacaaaacttaaatattgaaattacaaaattttcatgtattgcattaagaagatcaataccgaaaaaattaccaaaagatttcatttatccaaattattcagttgcaattgaaattttgaagaaaattttattatggaatacagttaatggtgattggtataatttggctgaagaggtacttaatacattatatgaaattgatattaattctgatgattcatcatctgaagtattgaaacagaaatccatgattacatttggtgataatgatgaatcagttgataaaacaacattactgagccaactcttatttcttgcaggtcatattggtttaaagacaattatctttttagaaaaatgtgaagcagaattcaagaaaaagaagcaagaaactgaaaataataaagatgaacaagaaatggaattagatttaattggtggtacaaatgaagatgattttactgatacaattcaaaacattaaagaacgtgaattattatatgggaaagattccatattatcaaaatttgtaccattaataattgaaattataacaaagccaaaacaatataagaataaatttttacaaagacaagcaacattatgttttgctaaatttatgtgtatttcaccaagattttgtgaaactcatttaggattatacatatcattaatgaagaaatcttcagattcaattgttcgtagtaatttagttttaggattaggtgatgttgcagtttgctttactaatattattgatgaaaataagagtgcattatatagtgaattacatgatcgtgatttattagttcaaagaacatgtttaatgacagttacatttttaattttagcaggtcaaattaaagtaaagggacaattatcacaacttgctaaattattagttcatgaagataaagggttaagggaaatgtctaaattatttttccaagaattagcaactaaggataatgcaatttataatggatttattgaaatgttaagtggattgaatttgaatattaatgatgaagaacaggatgataaaaccaaaagggaatatcaagaacctttttcattagaaaattttaaggaagttattaaatttgttttgccattcattaataaagataaacaacgtaactttttgattaagaaattagatagtagattagagaaatgtacaccaaatgaaggtattagatatgcattttgtataaaggaattgattagaagagatgattttggttcaaagaaagattcagagagtgaaaagagtaaatattataaggaacttttagagaaaatagctagatttgatcgtttagagagacttgatcctacacctccatcaccaaaagatgattgaatataagtatatatatattttatgctataaacaagtttataatttttatattataatatttaacaatctattttttacttctatcaccaaaaaattcatcaggatgtttgaaaacattctttgcggtaacactacctaaattataatctaatggtaattgttttgaatataatttaccagattctaaatgatccttaactaaatctgctaaaccttgatggaataatggatcaccatttaatgattcacatctaacaactttttcaggattttcaacagcttcctttaattcaatatcaatttcatgtaaagtttcaatatgatctgaagtaaatgcaattggcacaataacaatacctggaactgaatcaaatttaactaatctttgagatgttttctcagtttgtgcacctaaccaaggttttggaccaacttgtgattgccaagttaatctataaggatttgaaaaatttaatttttgcataactgcataaacagttgcagatacttcagcgggatatgaatcacctctatttataatatccattggtaatgaatgagcagagaattgaataacaacattttttctaatttcttcagggaattttaataatgcatcattaatatgatttgcaaatgtattaattaaacatggatgttgaggccatctatcaataattgaccatttaatttgaccatttggatcatgaactttagataatctatataaatcattaattgaagatgcagttgttgaataactaaattgaggatattgactaaatgcaacagctcttgtaataccatcatctaataattgttttagagtttcttcagttaaaggatgtgcataacggaatgcaacataaggtttatgaggtgcagtatttggtgatatttcatctaatctttcacaagctttctttgcttgaaattcagaccatttacgaattggtgatccaccaccaattctagcataatatttttcaatcattggagttcttctccatgtaataaatttagctaaaatattttgaaatggtcctaaggggattaaatcattatcagagaataatctgaaaaggaaatctcttgtttctggcactgttgatggacctcccatattcataaagacaattgctgtacctttaccatttttaacatcagcggtaccggtgccgttcccaagacgtttagcagatactgaaagttgacgtgtaaaatttcttaacatagtttccaattaattaagtgattgcttaaatacccgtagtatatatataatgtaataacagtgtaataacccttgtaaatagaagaaaagaaaaccagagtggcaaattaacaggattaaaaagtgttgataataatgattcaatatctaatgcatgatgtaaatttttcaaatttatgacgaaatggaacattaataagaacaataaagtctttttacatgtatactttctctaaggatgtcgtttgatattcaatgggataatatatgcaatgatgagacattggcattaacattcaaggaatttcttaattctaaactatctgcattatcattaccacattatttagccaatcttcatgtggttgattttaaattaggtaatgttgcacccgatattacaatacgtgatataaatataccttttaaggagttctatgaagctttagatgaagagaataatgaaggagaggatcaaaaagatggtaatgatgttgataataagaatggatcaaatgattcaattaatgatggaaataattgttccgataatgatgatttatatgatcatagtaagtacagtgatgaagaagatgaagaagatgatgatggggaggaagaggaggaatttgatgatgaaaaactctattttgacgataaggaaagaattggaagtataaaggatcaattaactaatctacgaagtaaaaataataataataataataataatagttacaatagttacaactataataatcaatttgaagaatttaaatcaataccaatgacacctagaaataaattcactagctccagatcatcatcaccaacaaatccgttgtttatgaatggaccgcaatcattattaacttcaagaacaagttcaggaataacgcccactatgggacatttaggtgttggtataaccggatttggaatagcaggagggaattctaataatacaaatacaaatggaaatggaaatgttaacaatgcaaacatgatgagatcatcaactagtggatatagtgaaaacgattatttccaaccatttgccaatcatacaatgtacggtaatgaaaaatctttaaatagtatattacagggaatgtcaggtatggaaataaatgataatgaatccatatatgaaaatgagagtaaaataaataatttacaaatgaatgaaaccaatataaattctaattctaattctaatataatgaaaaaatttgatacatcattagatattcaattatctgttgatattgattggaattcacaattatatatagagattttttgtgatttattagttaattatcctgcacctgaatttattagattaccagttagattgaagataacagatttgaaaattcattcattaatggcaattgcatatatttctaaacgtattttcatttcatttttatgtgatattgatgatggtaataatgataataataatgatatgaaaaaaaatgatgattattatgaaaatgaatcaagacaaggttcaagaaaatcaacaacaactgcaagtacttcaactaatatgaatgattcaacaacttcaacaaagggtaaggaaagaattgatattttgaaaaatatgaaaattgaaggtgaaattggtaatatatttgatttaaatgatagtaataattcattgaatggtaatattacaccaacattaccaaggtatagtaatatgggtaatggatttaattcacctatagatatgacacaaaatggaagtatgaatgatgataatactgatacagggttagttttaagaaatattggtaaaattgaaaaatttttaataaatgcatttagagggataattattgaagaactagcatggccagggtggattgaattagattttaatgaagtattagaagaagaagatgatgaagaagaggaagagaaagaagtggatgatcataaggaagaggaaataaaggataggaggaaaagtcaaaatagacgatcatcatcaatacctagttcaaggggtaaggaagaattcacatatattgatcaaaaacgtaatatgaagaatatggaagatggtaataataatactaatgttgaattacatgatgaatatatgtcaagaggtcaaagtagtagagaagatatgtccgtttattctaatgatagttattttacagataatgagtagattttatagattatataagtgattaatttaatgattaatgactaatttactgaattttagggttcttggagtaagattagtgatgttgatttgtaaatatctgaatatctcaaataaaagacatgttatcaataattaactttttcaattctttatatttctctttcaactagcttcataagaagaccagtagttactatacccatttccctttattcctagctatacaacactccataaagctattataaataagtaaataacccataccacaacaaacaccagtgtcataaactcacagaacagcgctaatatcggaatttaattcattattgaaaagttgaaattgttccattaagagatgatatttttttaagacaatttctttcttttttcagggtatatatatctaatgaataagtatatacagggtattagatatttaagttcaagtaatagattattaaaggagacacattatgatatattgaaaataccatatgatgcaagtataagtgaaattaagaataaatttaagaaaatttcactgaaattacatccagatatgcttaaatcacaaaaattatcaattgaagaaatgaatgaaaagaataatgaatatcttaagattaagaaaagttatgaaattttatcaaatacatgacaaaaaggatgaatatgatttacatttaggtattaaaagacgtgaaggtacatcaactaattcatttattaataataatagacgaaatactggttcaacatttcattttcatgaaaaatttgattataatgatataccacattttgataaacataaacatgaagctagaaatgaacgtacagagaaaagatttatgtataatcaaaaaattaatcaaaatattgatattttcggacgtgatttatataagaggagaacttggatcaaatggtcccaggaaggggatttatagagaatataaatatcaacctaatataagagatgatgagaatgaaggtaagaagatggcaagtaaggtaattggtggaattgttggagtatttttaatgtggtatgttatatgtgggaattattcaactaagaaggaagaaaagaaagttaaacctttgaaggtagtagagagtgataaatctgaaccaattgtagaagagaagaatagtgttagtaaaagtgggaagaagatgaatgttaataatacttatggactgtcattgattaaggaagatattataaaacgagatattgaaaaggagtttaaggaacaaattgcagagagtattgaatagaggttaaagtacatcattattcattattagtaaataaacattatataaataatataatcattaatattagatatcactacttaaagcacaaagagcagcaccaacacttgaaccatcttttgaaatattaatatgtaaccttctttcacctttactaccaacttgagattctgcaattgcatctctcatcattgttctaaaaccgggataaaattcaacaactgaaccatcaacaccaacatcaacttctacattatgacctttaaaagcatcaattttcataattaatgcagtaattggaattgaagctaaatgtgaagctcttttagagattgaccttgttaatttttgaataactaatctttcttcataagttgttggtaatcttaacatatttttcaattctaattcagttgcaattaatttagttgaatcatcaatttcaaataatgacataccttcagatgataataaccaaggagttcttaatctatgaggtaaatctgaagttttactatattgatcgaaaattaaaccttgagaatgtaaatcaactaaaacatttcttaaaatttcaccaaggaacatacctgaaactcttttttcaaacatatgataaccaggattaacagataatttatcaacttcttcatcatatttagtaacaggcagtaattctaaatcattatcaaaagacccccattcagtatttataaccatatgatcaatatttttcgattttaaatcattataaatttcagttggtaattttttaatattttctaatttttcattataagcaccattagtaccagtaccgaaaatacaaccaattgaagttaaaccttccttattttcaccagtataagatctagctaataaagtaccaacggtatcattagctaaagctgcaacatgaactgggattttttgttcatctaaatgatattgtaaaactttaacaacatctttaccaacagtatcaggtatattaaaaccttttgtccatctaattaaagtaccagaattaagagaagtttgatcaacagggaaactaaatgtaaaacctaatttaagatgatttgatttatcattattatcactattaaatttttcaccatgatgttgctttacaaaagtaccaattttagaagctaaataagagaataattcatcagttgttgatttcattaaatctacaggaattggatttttagattgttttaaatcgaaagtatgatcaccattaagtttaacagaacaaactctaaaattagtaccacctaaatcagctgctaataataaacctttttctttaccatttggaattgaagtaacaaaagttggaatcattggtaaataagatttacttgaagatttttgattaagaccatgttcagcagatttaataaataaatcaactaattgttgtaaacgattagaatctaattcaaatgattgacaaattttatcaatttctttacttaattgagcgttcattgtatatagagagttgtattataaaaagagagtttattaattaaagaaaagagaagaaaacaaaacaaaagaaaagaaaaagacacaagtatcaacagaaataaaaaacagatggaaataatcatgttaaatatcaaaatagaaatggaaatggttaatccgaacagaatacaagtccccacagtaagtcaccccacaataatttattattataatattattccgatgacgttatttattattttattatgtggagtatttgatataccgtcgcatcgtcgcattgtcctgggtattacgtaatgttgaacatgtctattttatattttcattagttacccgattagggaataagaataatcattattccactttttttttagaaaccaccaattaacagcagacaaattaactgtttgtgcacctaccttaactgttcttttatttacttatttatttacttattgatattgattttatttatttttagttatctattatacaaacgaataatgaattattttatcttattttattttattttatttattccctccatttaacaaatacttcatcagtacgaaatttttgactacaaacactatcctctatttgacaattacctcccattctatattctaaaatacctgcttgtgcaatcattacaccattatcaatacaaaatctttcatcagttgcataaacataaccattacgatcttttaccattatattcatcatttcttgtaatctttcattacaaccaactccaccaacaattaaaacttgatttgaattaacatgtgccattgcacgttcagtaatttcaactaacattgcaaataaacattcttgtaatgaataacataaatcttcaattttttcattttgacgacgtgttaattcttcaataaattctaatataccactcatacttaaatccattcctttaactgtatatggtaattcaataaatttctcacctttcttagctaattgttcaatattataaccaggtgatggtgaattagaaatttttaaaactcttgcaaatctatctaaacaattaccaactgcaatatctaatgtttcaccgaaaattctatacctttgtctactatatgcaattacttgtgtattacctccactaacatataaaacaactggattacttgcacctgtaacttctctacccatttcaatatgtccaacacaatgattaactccaattaatggtatcttccacattaaacttaatgtacgtgcagcaattacaacactctgtaatggtgcacccatacctggaccttgtgtaaagcaaatacaatttatttcattaatttcaattttagcttcacttattgcctttgcaacaatccttacaacccaattcctatgatgtcttgcaacatctcgtggcataaatccttgtcctggtggtgcattatatgtatctcttatattacttaatattattgaacgattttcaggatttgatggatctccaattggttgtttaataataccaataccaatcttatttgctgatccttccatacctaaagctatataccatttctgtccaggtttagctcttgtatcaaagtctaatttcatattgagtgtttatgtatatgtgtttgtgtctatcaataaggttttcaatgaaaaatatacttcaataaaaaattcatgaaaaaaaattcatgcacgaaattactaagattcagtaatagacaatttttactagtagattttatttgaatgattatactggattttatattataaaggaactatacgattaaacagaaagaaataaacaaattagacactaaacaaacaaacgtaacatatcagaccatttaaactcttttaaaatttctctaacatcaacattagcatcttcattagcatctaaagattttttagtacttgaattatctgattcaatatcaacatttgtagtactagtagattcataaatacttgattcagatgaattaataacaccaaatgctgctgtcattggtttatctaatgcatggaattctttacctgttcttttacagtttaagtaaataattgaaatacgaactgcagcacataataaaccgaaaacaataccaccaaatggtgtaataacaaaagcaccaaaagcaccccaatcacttggatcataaacaccattccaaattaataataataaaccaccttgttttgcactatcataataaattgtaccgaaaacgaaaactgctaataatgaacctaatgcaccaacaataacatctaaaccacgtaagaaaaagaaatgttcagataatcctaaaaacataattggaacaattgcacatgataataaatctgcaataaaataaatttgtaaaacatttgcagaacattcaattgcaacaactaatgcaggtaccataataataacaacaataattcttgaataaataattgggaatttatttctaaaaatatcatttgaaattgttgaagtaacagctgattgtaatgaatcaaatgtacaagttgataaacaaactgaaaaaattaaaataactccaataatccatttatgcatatcagcaattaaaatgaaaaatgccatataaccatttggatcactaactgttaatgcacctgtccaaactgcaagaatacctggaataccaactaatgtacaaataactgcagttacaaatgctgcaatacctgtagcaatatataaatctttatcagttttagctgcaaatgtacgtaaccaaaaaccagacataaacatatcattagttaaaattgcaacatttaaaatatagaaaaccatccaacctaatttatttgaacctgtcatttctttataagtatcatgttttaattgatcatcaatatgaatttcagttgcataaccaataacaccaataactgtaacaactaaaacaaataatgcttggaaagtatcagttacaaatgaaactgcaaatccacccattgatgtataaatagttgtaacaacacattcaacaacaattgcagcagtttgatctaatcctgttaatgcattaatagctgaaccaactgcacttaattcagaaaccataaatagataaagtgttaaaacagttgcagctgataaacataaactcataattggaccatatctttgattacaccattcagttaaaacaaaaccatcaggacatcttcttctaattaatggacctaaaaatgaaaacataacaattggaactgcacctgctaaaacataaacaagtaaaccttgaatacctgcaatattagcaatttgtgtataagtagttaaaacaccacaacccatagctataattaaaaaaagttaaaatattatgttagtacaattgacttgaagtgaatgaaaaatggaattgatggtatgtagtactaataatgacggaaagtcactatacgactttctcctattcaaatccatttttccaatagaataaaaaaaaagtaaaataaaaacatcacagtgattaaatgtagaagtgatataatgtacctctttcatattcaatcactgtaatgtttgaataaaagaaaagagtcaacctctttttcaacaatatatgataatcctcccgcaagtattaacttgatcgagttaaacggtatagtctcagccaacggcacccgtatatcaatattgtactaaaaagaagtataaatatggaaaactaattggatattgagatgattataatgattattttgttgaaaaaagttttatagttggaaactatttcttttgtttttgttacttcttttaatttaattaaagaaataaaataaacaaaatatactaacctgaagcaataaaattaagagctaatgggatccctgttgttgaaccatttgatgaaagaaattgttgacctttggatttacgatattgaatgattgccaatgcaacaccagatactagcattgcaccatatgacaaataaataattgcattagacgcttgaaatgagagacccattgttgtcaaaagaagttgaagaaaaggaaaaggaaaagaaacaaaagaagaagaaaacagttaatgaagcagatacagaaataagaaatatgttcatctctttatataaaatttttttttcaataatcattctaataatcgtatgttgcattgtttaatttatctgaatttatctaattaacttacacactattcagagtcaaggagtataatctcagaggtgtctcccatggatactgactgggagacagagaccttacgcttattctccttatccttatccttactcttagacttcttcttcctaggtttttcaatacgactctttgtagtgtccggagagtcaatttccgaacttctagatttaggttttttacttttaactttatttttcttagatcttttaagtacagttaatgccgtttctgtttctgtttctgttcccgttgttgatatgtcagtttactttttcccgtttaacggaaaaaactttaatttcagggttttctactgtaacttcattgacaagttcaattgaatcattatcactatcactatcttcctcttcttttaacgtcgggactaataatatcaacttcattaatattttcaccatttcaccatcttcaccatcatcatcactagcatcaatatcttcaaccatacttgattgtgcagccggattactaaattcctcaaatgaattatcattacctgtaacatttaatggactattaacctccgggattggttcagttggactttccttatcatccttattttcttccttcttaagttcattcatactttcagcttcctttaaacatttatcaatataagtatgtgcctttaagaaactattcttacaaattaaatcactatttaaaacttcatttaaatcaccttgacataatttttcatcatcaaaacattctctaaatcttcttaatttattaatatctgcctttgatgtaaatgttaatttagttaatgatctaataattggtttatataatgttttatgaagtttattatgatgatcataatttcttaaacatttcattaattgaataccaaattctaaatgaactgaacttgattccatttcttcatcatcactaattgctaaattatatggatctgtccaataaaggaaattttcaattataaatgatgcagttattggtttctttaattctaattcttcattatatcttgtaattgaatcccaatctttaaataatcttgtaattgtatcatttgcaatacttgcaattaattcttgatgatatgctcttgaaaatgcatatgttggtatacaaaatgttaaacattgctttaatgcttgatttttattaacttttggattgaaaaatgttaataatgttgtctcaaataattcatgatctgtaataacaccacataaaaataatttaaataatgtaactgcaacaactgattgtgcctcaggtttactctcatcctttaatgttctataaaaaactttagcaactgccattgaatcaatacttctttgattttcactttgtaaaatacttaatccatgaattgttaataaatctccaattacttttaatccaacaacaacaaatgattcatgatcacttcttgtaacgaaaatacctgcaacaaccattgttgaaactgcaacttccttatctaataaaccacataatccatgacaaattaatgctaattcacgaacttcaacttcagatctttgattaacacatggtacaataaaattatctaataatgaaattaataacatattttctcttaatggtgaaaatactaattgaagcatacatttagtaattgttaaacaatctgttaatatttcaggtgataaaacagtaatttgatcaatttcttcttgtcttgatttatttgcttcaatcattgattgtcttgacatatcacctgcagctgaatggaaatcatcatcactatcagaatcagaatctgaaatttcaccatcatcccttaataaattttgaactttttcattaatattttcaaaatcattatcattatcattatcattatcattaatagattcaatatctcttgctcgaagtttattttctgatattttccttaattcttccttttctttctgttcttgccttcttttaatttccattattctttcataatcagaatcttttaaatcattaataatttcaacagtcatttgacaaaaatctctttcattaattgctaattttctaagacattccattaataatggtaataatggttcagtaactgtattattacttaatgttgttcttaaaatactgtacattttatttctaccaaattcatcactataatcataatcaattgcaattttaagtaattgcattacaatataattataatcatcaggatcaataattccaatttcattagcatattctggatttttcataattttatctctattattactaattttagttaaattttctgttcttaaattaaaataatgttcaaataatgatgcaaattctgttgcttctaaaaattgattttccaaaatattatttaatttattatcttgacaatattcgaaaacaattctaacaaataatgaagatgatggagttaaattattgaaaaattctttattaaatttagcttctttaacaatatttggtcttttatcaagtaatgttctaacggcaatttctgcaatatcattttcaataacatttaaactattaataaattcagcaatgttattatttaaatcattcatccaagtagttgttaaccaattagcacaagctttcctaacagattcatcacgatcacgtaacccccattgtaataatttttctctatgatttaaattaatttcattaaaatgtttataagttggtaaaatttttgaaaataataatcttctattaatattatcaatatcatgagctctttcaacaatgaaaggttcagtaaatttatttttttcaatatgttttaaacatgatctacgaacttcagaatttggatcattttgcattacaaatctaatttttttaccagctaatgataatgaactaccatcatcattttggaaacatgctaaagctgaaattgcctttattctaacaggtgcatctttatcataaattctagttgttaattcatcagataatgatttatataaatcttcatccataccaccacaattactaattatatgtgataataattgacatattctatatctaacagtattattagatgcaactaaacctttcattaaatattttaatgtacgttcaacaaaatctgaataaatatcctctaatttatccattggtatattaattggaattttattattattattattattattatttttgataaaagtttcacttgatggattaacaaaatcaaagaatgatgaaataaatttaacaactttatcagctggtttaatattctttttcaatggtaaaattttattcaaaaggaaacaaaagaatctattaaattcaaatgacaagtttaaagtatatgatttatacattactgcttgtaaaaccactaattgtcttttatgagctgcaactgttgtttgagactcattaaatactttcctcattgcaagtttaatatcttccatatcattgatttctccaataacatttaaatactgagtttgtttctttcttgactttggctttttcttttcatctgcttttctgatagcttcatcaatatctccactctctatatcatcatcatcttcctcctcatcatcttcttcttgatcttcctctacatcctcctcttcttcactgtcatcatcattttcactatcatccactgcactttcctccccattttccacctcatcctccattctcatttcctcaaatgcacctctctccttcttcactctcatatgatttgccattgtcgtcttacccttactcttactacccatgattacttgtctaaaacagagctgagcattataaattatgaaacttaaagtaaacaaacgaaatttaattttttatcactgattacgtaatattagattagtagatctatttacttacttatacttaactttatctaatgttttaaagattaatcttataaaatctacaataaagaatagcaatttactttaataaacctctgaatcttcgaaaagattgattttaacatcccaaggtggattaccaactctttgaggattttcaataccaattgattctaattctttaacagtattttcatctaattgaacaattttaatattatcaataattctctttgaactaacagattttggtaaaacaacagtacctcttgcaacagcccaagaaattgctagacaagcaggtgaaatattattctttttggaaatattttgtaaaatttcattttctaaaactggagcaccagttgaacctaatggtgaataacattcaattaaaatattattctttttacaaaattcaattaattcaatttgtggtaaacttggatgcatttcaacttgattacaaactggtttaattttgatttctttatcattcaaaattttctttaattttggtatattataattcgaaactccaattgccttagttaaacctaattcaactaatttttgcatacctttataagtatcaatataattccattcatcatatggtattactaatcttttaccttcatcattaattggcattaaaacatctgatttaggaatagcaacaggccaatgtgttaaatataaatcaatatattctaaatttaatctatttaatgattcccttaaagctttttcaggttctttacattcagaacaccataatttagttgtaataaataatttatctcttgaaatacctgattctttaagataatcatttattgctttaccaactgattcttcattaccataaattctagcagtatcaatatgagtgtaaccattctctaatgctgttttaacggcattataacattcttcatcagttgatttccaagtacctaatccaatagctggaattttagctcctgtgtttaaagtataagttttagtacatctagttattgttagtatttcgttttgttagttggtagttatttaagagtatacatacatttcaggaatcattctggttggttttgaagaagaaagaaagtggttgtaattgagtatatcttgtaggaactgtggagtttttatattgtagttattgattttgattatgatggcgggagttacctaattgggtaattacggaatagataagagaatttaaagacctttttttctatttagtaggttattcatacaatgagtcaagagtacaaacagtccttctctttaatgtatctgtttagtatattgtattctaatataatgtatattacttgacaatgtattaacattaacctataactgtaaagcacttcatatcaataagacgcgacttcatatattattattattaacatgattttaaatttaacttattctgcaatacactacttttcctttaccaaaagtcaattgaatgacagatataaaccctacatttacattatataatgaaactataaggaaccctggtagttcaataactagtatcaatggatattttattgaaaatgagaaaaatgagcaaattatacgtgtaactcaaacttcaattgaattatggaaatttaataaaaatttacaaacatttgaaatttttattaatcaacaaacatttgcaaataatgtatcaattagtaaattatgttttgataatattgctaaaaattatttagtattgacatcagatagtgggaatttaacattacttgaatataattctaaattaaataaatttattgatttaaataatgaaattttctataaaacaggtttaagaaggttatcaccatgtaaatattcatgtattgacccaaagggtagagcaatcatgatatctgcaattgaaaaaaataaacttatattcccaatatctaataatgataatgacaaaaatataattatttcatcaccaattgaagcaaatagagataatattttaacttatgatataaaatcaattgatgttggtggatatgaaaataatccaatatttgcagcaattgaatctgaatatggtgggaattccaaatcaattaattattatgaatatgatttaggtttgaataatattctcctattagaatctagaaatattcatgattcaagtaatcatttaatcccattaccaggtggtgataaaggtccaagtggaataatagtatgttctgaaggaatgatccaatacatgtcaccatttaaggaaaatcattatttaccaattccatcaagaaatgataataataataataataataatattaaatcaataataataactagtgtagttcatcaaatgaagaaaggatttttcattttattacaaaatcaattctctgatatttttaaaataactatagattatgaaggttggaatgttaaatgtttgaaaattagatattttgatacaattccaatttgtaattcaatttgtgttttaaaaaatggttatctttatgctgattgtcaatttaatgatcaaattttatataaatttgaaaaattaggtgatgcagatggtgaaatggaatggaattcccttaattatcccaatgaagaaataataagaaataaggaatcaaattcatttaaatttaaggttaaaaaacttgaaaatttgaaaattgttaataaaattaaaaattttaatccaattattagaattaatttatcaaatggtaatttcttaacatcatttcctgaaatttattcaatttgtggtattaaatcaagatcatcattgaaaattttacataaaacaattaaattaaatgaaattattacacaagaattaccatcaaatattttaaatacattttgttgtaaaatacataaaaatgataaatttgataaatttatgatattatcatttttcgatggttcaattattttaaaaattggtgatgaagttgaagaagctgaaaattcaggtttattagataaagtaagtactttaaatataatgcaaattggtgatcattcaattattcaaattcattcaaatggtattaaacaaattatttataataataatgatgaaataattaaatcaaatgattggaatccttcaattgatttacaaattttaaaatcctcttgtacgaataatcaagtttgtcttttattaagtaatggtgaattggtttattttgaattacaaaatgaatcattagtagaatacactatgcataaaaattttaaatcatcaatttcacatctagctttcatttctaatgaacatttctctaaatatattattgttacatgtaaggataaatcaatgcatgtaatttcaacagactcaaagaaaatgttagaaaatatagatactgttcaattatcaaatattagtaattctttccaaataataaatgatacagttcatattggtttgaataatggtgtttatgtacgttatacattaacagatgatgggaaattaataaataaacgtgaaaaatttattatggcaagtccattagagatagttgtggtgagttttagtaatgttatgatagcagttattaaatctgctacatcatttatagtcattcctaacgatgatgatatagatattgttccattaccgattcctgaaaaattcatcgaaccagaagaggaggaggatgaggaggcagaagatgaagaggaagtcgaatactctaaaatttatggatgtattgaatcaatccattcagctgatgttccacaaggtttaattttagcacatggtacaaggttaacaattgcatcaatagattttccaaatgatgttaaattggaagatattaaaagaattttaaaaaatgataatattgaagatatcccacttcgttacactccaagagatttatgttgtgatttagagaaaattaatggaatgagttatataatttgcagtgatagtgatattttatcaccataccaaaaaggtgaaggtgaggaagttattacttatgataatgaaatttatgaagaatatgatgagaatattgattatacttataaagaaggaaattgtggaacatgtattaatgtttattctactgagaaatgtgcaattggtcaaacgattgaaatattaggcggtgaaatagcaattagaataggttatgctaaagttgatagcattgattatatttttgtaagcacaattaaggaaacaaaatatttcttacgtgtttatattgttgaagaagatggtagtttaacattcaaacataaaactgaatttaccaacgcagtttcatcaattaattcatttaaaggatttgtaattattggtatgaataatgaattaggattatacagtattggtattaaacatattttacgtaaatcatcgataaagatccccttgggtaaaataactaatattgcaactaataataaacgtatctatgttaatggaaatgatggaatgacagttttagaatatttaacagattcttcaatgtttatcatcctttgtcaaagtagtttaccacgtcatattacaagtagtgttatattagatgaaagtactattattattggtgataaatttggaactattagtggatggagagttattgaggaatcagatggtgaatatatgattgaaatgattatgagtttttatgttggtgatgtaattacaagtttaataaggggtagattaaatcaaaataatcaagaatgtataatttacagtggtattaatggtactataggaattatgaaaccaattattagtttaaaggatattaattttttcaaagaagttgaaaatataattagaaatgaaggattatgtggattagataattataaatttagaagttgttacgtacctaaaaaagcatgtattgatggagattatttgatagtgggagatattaataaaatatcaaataaattagagatggaaattaatgatgtttccaaaaggttaaagagtgtaaaatattaaataaaaattctatataaactattaattacatccaaacatttttaaatggatcattagaatttgaatttgaattagaatttaaatttaaatttaaatttgaatttgatgttgttgtaatatttgaattaattgaattgaaagaattaacagaatttgttgaattcattgtacttggagttgaataaagacttaaaattgatttcttcaaatctgccttattaggattaacatttgcaggtgggacaaaagtattaattgcagctccaccaccagtttgaattggcaatattggttcaacaaattttttaacaggttgttgtttttgtactggtacttgtactggtacagttttctctactttagtttcttccattttataatttttaataggttcagatccattacctttccatttacctaaaacatatttagtccttacaaaactttcaactttaccatcaattggaacataaccaccaattttctcttcatctatagatcttgctgataaatttgcttcccaaagagaatttgctcttttatttccccatttaaccatactttcagtttgttcatcagtccatgaatctaaatcaacagatttaacccttgatatatgagtacctaatgatctatgtataccactacatctaatacaaataaatacacctaaattccatgatgcccatcttggattacgtgcaactttacaatctgcacaatgtttattatattcatcattcaataattcttgtagtattgctttattctttgcagttgcagtagttgatttattatgtgacatggttagtgaaagaaggtgataattgatgtcggaattctttcaatttccaatcaacattgtgaaaatagagatatagtgcgatttacgtaattatatcatattactcatatcatattattattattattataaaagaactactaaataaataaataacaaagacattaattaaaatggagaatctaatcttgataaaacttctttacctttataataattatcagttttaattgccttttcaacaacattatcaattgtaaaaccgaatttttccaataattcaccagctggtgcagatgcaccaaatctatctaaaccaatatgagcatgagaatatttaccccaaccaaaagttgtcataacttcaatactaataactggtaaaccatcagggaaaatagattttctataatcataagattgtttatcaaatgttaagaaatcaggtaatgaaacaactctagttggtacaccttgttcagttaatttctttgcagaatcaattgctaatgaaacttcagaacctgttgcaactaaaattaatcttgcatcttgaacatcataaacaatataaccacctttggaagctttttcaattgatgaattttctaattgaggtaaattttgtctagttaatgcaataattgaaggagtttcaattgattcaatggaaactttataagcagctgaaacttcattaccatcagcaggtctccaaaccattaaatttggaatagatctaaaatgtgctaaagtttcaattggttgatgagttggaccatcttcacctaaaccaattgaatcatgagttgcaacccaaataactggatgacctgataatgcacttaatctaactgcacctgcagcataagaaacaaaattaaggaatgtaccaccataagttttataattagcaccataagctgcaataccattcataattgcacccataccatgttctctaacaccatatctaatatatctacctttataattacctaaaccagtttgaggaggttggaaatcaattgcatcagtccatctagttaaatttgaaggagttaaatctgctgaaccaccaattaattcaggtaatgcttgttctaatttaccaagaacaatttcagacatttttcttgaagctaaaggtttatcatttgaagtataaattggtaataatttttcccaatttgaaggtaatttataatcacatcttctcttaatttccattgcttcttctggatattcttgtgaataagcatcaaataagttcattccactttattattttcttcttcacctttagcaataattttagaataataatcataaacatcttgagaaacagtaaaagattgatttggatccataccgaatttttcctttaattgtttaatatcatcaggtttaagtggagaaccatgaacaccagaagtaccttgattaagagaaccataaccaatagttgtagtcattttaatacaagttggtttatctttagataatttagccttttcaattgcatttgacagagcagaataatcagtatcagcatttgaaacatgtaaaacttcccaaccataagattctaatcttttagaaacatcttcagtaaatgccatattagttgcaccatcaattgaaattttattatcatcatagaaagcaattaaattacctaattgtaaatgaccagctaatgaacatgcctcagatgcaacaccttccatcatacaaccatcaccaaagaaagtataagtataattatttgaaatttcataatttggcttattataagtagcagcaaaattagcttgagcaattgctaaaccaacagcatttgaaataccttgacctaaaggaccagttgtaacatcaataccaggagtttcactttcaggatgaccaggagttttactatttaattgtctaaattgttttaaatcatcaatagagatatcataaccaattaaatgtaacataacatataaaagagcaacagcatgaccatttgaaagtacaaatctatctctattaatccattgaggattttttggattagttttcaaaaatttagagaataaaatatgagcagctggtgccatacccattggagcaccaggatgaccagaattagcctttgcaacagtatcaactgctaaaactctaattgaattaatagccttggtagtaatatcagacatggttgtaaaatgaaaaataaagaagagataattaatgaaaagccaaaatatatggggaaatgacaaagtttatttaactaagtattgatttcccaacatattgatattaataatattatgccaatgctagatttctttaactattattttaattattttaatggaaatgtgtcatccattgaaaatttatttttaggaaaatcgtcgcgtcggtcacgtgatttattggagatcacgtgagtattacgtaattggtataattacgtaatggtttaattacgtaataagaaatatttttaaatttcattagctaatctatattatgtggggtaattcattttaaagtttttgatattagatattacgatacttgatattagatattagacattgtataaaaagtattaaacatattaataataaaggaacatcactaaactaataactaacaaatgacaaaatcaaaatcatcatcaaaaacatcatcatcaataaatacatcatcaaatacacgtccttatcaatgtccactttgtgataaatcattttcaagattagaacatagaacaagacatattagaactcatacaggtgaaaaacctcatcattgtacaattcctggttgttttaaaagattttcaagaagtgatgaattaactagacatttaagaactcataataataaaattaagagtagtaatataaagaaacaatctaataataaattaaaaacatcaccatcaatgacattattaatgaatgctgcaaataatgaattaaatcttttacaaaatactaaacaaaatacaaaattaccattactttatacaaaatcactaccttcattaacaaattattttgatccaataccgaataatcaaattccatctaaattaccttcaattgaacgtatatcatcaatgactaatttaccaccacctgtatcattagatgatttaaaaccaaaatttcaattatctgatagtttaataaatactccaataacaactcctaaaatttcaccaaaattatcaccattatcattcactactactactaacattcataaattaaattagaattttcaatttctttaattaataattcacgacgatttaaacgacttgatcctttaccatttttactatttgttaaatgtgtaagacaatgacgtaaataacttaaaaatttattaccattagtaccagtattattattattattatcacttaattttttaattttagttaattcaccacattcacaatatgcaaaatatttaaaattattatcataaacaattaattttggtaatggatgttcagttccatcagaataaactccatgatgttttgtaatatgatgtaaatatattgaatcattacgtccataaaaataatcattaattgaattatctaaattattaattattggacaatatggacacattgcttcaacaatataattacaatcatccttatttttaccaattttatacctcttttttctatttaaaatttcctccctagtatatttatatccatccttacgacgttcccttataatgaaaggttcataaaaattaccaatttgtttacaataacgtaatggtaatgatttattattaatttcataatgtggttgatcaatataattacaataatatttccaatctgaatcattaaatttatttaataaaatattaacattttgaatattatttggtaattgatattggaaatattctaattgccattctttaaatggtaaaatattaaatactttaccttgaatactaattgtttcaggtaatttaattgaaattttttcaatattgtaatgattatattgattaatgtaattaattgcacgtaaaatatcattttctgtataaacaattggtttcctcttaattttaataatttctcttggttgttgaattgtttccatttcaacataatcacttccttctttttccttcccttttccatccccttcaaattcttcataaaaattataatcattactagtatcataaaaatcaaatttaatttccttaattttcttaccattattttgtaattggaaattctcaataaattcagttgattgataattcatcatattaatagtaaattgactaccattattaatttgattatcaattgaaagatcaattttatttaatttatcagtattttgatcaattaaactaatttcactaatactactattattatcacttttcttatcactatttggtgaaaaaattgtttcatctggttcaataaattcacatccattaggatacgtattacctccattaggataaatatctttattattcatataaggattttgattatttgaattaattccattatacgattccattgaattttttacatcatcatcattcatttgaatatcaatatcaatatcattatttacaagttcttcattaaattcatccattaattgttcattaacaagccaattatcattatcatatgattgataatgatcaattgattcaattaataattgactttgttcaaatacatcattattatcgaccatatgaaattggaaactaccaacatcatcattatcttcctcatcaatagtttcaatttcaattccattgttattgttgtatagatcgtaatctataaaatcatcaaattgatccatgttattcataataatattcttgatcaaataatataattaacataaatcaaaaagagaaatcagataagcatgaatcaaaggtatcatttacaccccccataaactcttttattctatttcattatcaacagaataacaatcagaacagtataatatagttacatctgtactgttaaaactatcattagtttcggaacagtacaaaacaccaactccgaaaagtaaataaaaaaaatttcatttttcattatcgcgattacataatcattatacttatttatcctattacttatcctattacttatcctatatacttataaaagccaacctttattctcaacttgtttccataatggtatactctcagctgcacctttgtatttaatacattcagctgatgctcttgttgcaaatttaattgaattttctaaattttcattacgataatcatttgttacaattgcacctaagaaagtatcacctgcaccagttgtatcaattactttatcattaatatcctctgatggaatataagcataagagaatgaaccctggttggaatataaaacaccatattcacctaatgtaacaattataattggttttgttataattgtacgtaattttgataataatttaatattcatattaacaatttcaataaattcattatttggttcaaattttgaaatattttgtaaaattgttaatggatccctatttggatttgaatggaaatttttaactaatgtatttaattcagtttcatttataattatataatttgaattatgtaaagaatttaataattcattattaaattcagatcttttatttggtaatggtgatggattatagaaaattttaacatttgggtatttatttgagacataatttataattttatgaggattagaaatttcattttgaattatcattgaatattttaaatcatttgaaggtgcaattggtttaataataggattaatatttttattggcaatattatttaaaatcattgattgatttggagttaatgaagttgttgaagaatgagcagatgtaccaccaagagaaaatgaaacattagttaatctattttgagcagttaaattaagatttgaagttggtctattatttaatgaaattgaaggtttacgttcagcaattgttgaaggtacatgaaggcttgtaatatcaacatttgaaagttttggagatggtgaataatgatttaaattattttgtgaaccatgagaatgtaaatctgatggaattgaatcacttgatctattatgaatattataattattatcattaattgaacctgtaattttagaagataataaatcattactaaaatttttatttgccaaattagtaccagaagcagaccaattatgaattaatgcaccatttttataaactaatgcatcagaggagttattacttgtacttgtattagctaatgaagccattgaaccatgagaatgaatatttgaaggaggtaaattatttaaatcttcagttttagccattttttcaccattaagtggtttagttgaatgagaatgtaaatttgaaggtaaattagtatcattaattgattcatttaattcagtaaaatttgaagcattgaaaaattcatctaattgatcaaaagtaacatcaaaatatttatttgcacctcttgtaattataattctattttcaccatttgaaaccatatcatcatcatcatcatcatcatcatcatcaccactttcttgaacgataattgttgcagtacctgtttgaatattatctaatatagttaaattatcagttttaacattaaatttttctaaataattaataaatttatcttttataaaatcattaccaatacaaccaaataatgaaattgtaaatttatcatcaaatttctttaattttgcacaagcaattgcttcattaaaacctttaccacctaaatgagattcaaaagattcaccaatgacagtttcaccaggtgaagggaatttacgagtacgagtaacttgatcgtgattaagtgaaccaaaaactgcaattggcatttggtttaaaggattgtagtagtagaaaagaagattaaaagaaggttcttttattaataaacatgccttattaaataataaattaaaattgatcattcattatcttaaaagattaagttaagttaattaattaattaatgtcaccactgtaatatatcccacccctcttttattgaatcgtcatagtttcgtcattatcatatttatatattaggtaatcatgtcagtcacgtgaggcagtcgcgtctattctatattacgtaatacaatgttattatgtaatgttattacgtaatgttattacgtaattgtgttattacgtaagctattaaaattttggttggtataaatgacttacgtaatctattaacgaaaaaaaaattgttgggcggtaataagccattaaaatttcaacatgatttcttattattatagtattattaggtattatctaatctattttaatttttcagttattatggttaattacaccgaaactgttttaaatttatataagaagtaagggggttcttattatttcatttcatttaatttcattttttaaattttaattattttactttctttctcttttactattccttcacttcctaataacaatggattctgttgatattactcaagccaatgcagtggctgcaggtactaataaacaaacaaagagaattgttgcttcaggtattggtggtcgtctgatgggtactaaagcaatgacaactgttacagctgaggaattagcaaaagattcagttgctgaagttttgaaaagggataaagaattaagattaaaatatgaaaaggaaaaacatattagtgaaaaaccttggacttggtcaaattggcatgaacatgttaattggctaaattttatgttagttttattattcccatcaattgcaatgggatgttcatattgggttaaaccaactttccaaactgttggtttaggtttattattattttgtttatcaggtttatcaattactgcaggttatcatagattatggtctcatagagcttatgatgcaaaagatccattaaaaattttctttgcactatttggtgcttcagcaattgaaggttcaattaaatggtggggtcattctcatagaattcatcatagatatactgatactcatagagatccttatgatgctaggaaaggtttttggtattctcatattggttggatgttattagttccaaatccaaaatttaaggcaagagcagatatttcagatttagttgatgattggattgttagagttcaacatagacattatttatcaattatgattttcatggcagttattttacctgctttaataagtaaatattttttcaatgatttttggggtggtttcatttatgcaggtttattaaaatcatttgcaattcaacaagcaacattttgtgttaattcattagctcattggattggtgaacaaccatttgatgatagaagaactccaagagatcatttcttaactgctttagttactttcggtgaaggttatcataatttccatcatgaattcccatcagattatagaaatgcattaaaatggtatcaatatgatccaactaaaattttaatttggtgtgcttctaaaagttggacttgcatataatttaaaaaaattttcacaaaatgcaattgatcaaggtattttacaacaaaagcaaaaaaaattagatgaaatgagatcaaaattaaattggggtccacaaatttcagaattaccaatttggtcaaaggaagaatttaatgaaaattcaattaataagaaaggtttaattataatttcaggtattgttcatgattgttcaacatttttaactgaacatccaggtggtcaagcattagttagaacatcatttggtaaagatgcaacagttgcatttaatggaggtgtttatgcacattcaaatgctgctcataatttattatcaactttaagagttgcagttattaaagattcaggtgcttcaaataatacttattcaagtcaattagaatatttagctaaaactgaaaaacaacaactggaaaaatcaaattagttacttgatactatactaaactaaactctttactacttttttactttactttactttactttacttttacaattcatttcatttcaatttatgattcattttttatttcattttattatcatcttattattattattatgattattattacatctataaattacatagtctctctatatagtatattttcaaagaatatatcgatccatcttgtacaaattattaatctcggagtatagcccaacaaaaatttatcatctcagtcccaaaagggtaactcacgcgacagacgcgtctgcgctcttttattactcttttaggaaataagaaaacattattacatgaaaatatcataattaaattatattcaaattactggcaaaattagagatcaaatcataagggttttctaactttgaatcatctttgaatcactttaaagtattgaataacgatgacaagtattgatagatgttattatcgtactattacaattgatccggaattaaatttaccattatatgtacttgatacgacttttctaccatcatcaataattaacagtaataatagtaatactgatgaaaatgataaagtaaggaaatttatagatacattaatttccaaaatacccaattctgatcattcacttgttattttcacaaatggattttatcaatcatcaattaataatgaaaataaatcatctttatctgatgattcaagtttaaagataccacttcaaataattaaatttttaaaacttataccaagtgaattaaagaaaaatataaggaaaatatttattgttcattctaattggatattaaaatcaattattgaaatttattcaaaattaaatcttagtagtaccaaatcaatcccaataataattaattgtgaaaatattactgcattatctaaatttattgatataactaaaataccaatctcattacatacttatatgattgataagattcaatataaaaataataaaattatattaagtagacatttaacaccaatttatagtcgtccattaacaatttattcaaataatatttcatcaactaataattacttaccattaaatcaattttcaagaatttataataatttaattgcttatttatctaataaatcattagatattcaattatctaaaactgattggttaactattattaaatgttctataatttctaatgaaactaaaatttcaattgatattttatcagattgtttaaagagagatcaattaattattttatcagattattcatttttagaacattatatgattttagttaaatttatacttaaattatcaaattcaaatttcccacttataccattagatttattaattaattataaaatagattttaataatttaaaacaaattaatatatttttaaataaattattaacttatagacatccattaatagatttagataataatacaaataaagataatattactactacgacgatagatagttatgataatgcatatatacttattaaaatattcaaattgtttaaatttttatcaattaaattagagaaagaaacacatattttagaacctaatgttaaaaatcgtaataaatcaattgagagacaatcacttagactaatactttcatttactaaaattctttatactgataatgaagattcattaattaatgatgatgatgatgatattggttttgataatttatttaaattagttcgttcaattattgaaaattttgataatttaaaaattttcaatacagattatacaattgatgattttaataatcatttaacatttgatgattttattgcttttgaaaattttaaaaatcaacaacttggtattaatgatgtaattgaatctaaaattataaatccaaataaaataaaatgaaaataagcaagaaaagaaagacactccaacatcacctgttaaaccaaatagaataattgaacaaaatggaaatataaaaccacaaaaacttaattttaatacctcatcatcatcatctccatctccttcaccaactcctccaactccaagaaaaaatcatttattatacacaatgaataataaatcagttgattctaaaagatcaatatcatcaagttcacaatcatcaattgaatcaatatcatcgaattatttaccaacttcagctgattcttcaatacctgtaactaaatctgaaattgaaatgattgcaaaatcagttgaaagtttaggtattgatgatgatgataataataataataataataatattgatttattcaccacaccaaaaagaaataatatttcaaatgatgacacagataatgaaacaattaatgatatagttgaagatttacttacaccaacacaaccatcaattatgtcaccaatgattcaaagacaaataaattcactttctacaaaatcttcaaatcaatcactttattctacaaatttaataaagaataataatttaagaaaatatactgaaaaagatttagcagttcaacaagaagttgaaaaggcaaagcaagctgcaagtataaaggaacaacaagcaaaggaagttgaattaggtgttagaaggggtgaacgtaaagtaagtagacttgcaagactttatgaagaaaaatttatgcaataaataatgaatattatgatatgataataatgataatgataatgatttataaatgtctataattatgtctattttttctatgtagcttttttatttttttggtaatgcattattgaattctctaacaataatttcacatttaacttcactacaaagagattttttattattatttgaaacatttttcaaaaattctaaacctgaagatttttctaatgattcaattggaacttcaaaatttcttaatggagtttcatttggtataatttcatttggcataacaaatgctgcaattgcaatatcatttgaattatttgatcttttaaaacttttctctgcaacaattaatttaaaaaaatgtgttggaactgcaatatttggtggattaccaatcatttcatattcaactctaaatttaccatcattacatttctttggtaaatataatggacctgtaataattctaacagaattataatcttttgtaagtcttctacaaaaatcttcaaaatgtgcccaataatctctattaaacccagctccaacttgtggtgacatattagttaaataaaatgtttcatccattgctaattgtgaaaattttgcatttgcagctggtgcttgatgacctctatcataacctgaacggaaataatcttttaatcttgcacgaaatttatcaggtatactttcatcttctttgaaaactgaatttttcctatcaccattatcaatatttttactaatagaatttggtgttatatgttcaacaacataatatggatttttagtttgtctatcataaacactaacaaattcttgatgtgttgccatatcatgaactggacctgggaatccatatttgaaaaattcacttggatttatttcatctccagtattggttgtagtattatttgatgatcctttacctgatggaacaccaattggagcaccactaccaattggtggaattggagctgatggtgtaggtgttgaatttgaatttgatgatccccaaaaaaataatccaccagataatgcagttgcaggtaatacgaatgtacttttaaacattgtaatggtgattgatagtgttgttaaagagattagaaagatcaaaaagatggaaaataaagatgttgaaataaggtgaaatattctcatgttgaaaaattaacgggttttttttcagccaatggaaatttttgttagtattaatatcaataaggttaagtgttcttctttccagtgggtttattatacttctattggatgtataatacttgagtggtttgaagagaataagtactaataatgattgtagtttgattttaattatttgggtcatattatattgtatttcattctaatacagggatcaatgtgatgtatcacattttgttatttaaatagtaaacatgagtgttaaatgacttatactcattcattatgtgatatatcatagtttttttgttgatgtgtcagatattgttctgaaattatagaaaattacttaataaagtttataatgttgagccttcaagaacgggtattatagttttgctacctgatttacagctatcaatagttgcatagcatatagaccaattgagaacattcctgtagaaaatatatcaacatgaaactctataaagatagcatacattgtctaaaataatgtttttaattcatctaagacaaatgtttcgaataagtatgttgaataagcaaataaattataatctataaacagaaatttgttataaatattagaaaaggggataaaacgaaagtaaagagagagggaatattgggaaaggtattgtttgtttcattggtgggagtgccataataataataaagtaaattaagataatagtaatcaataataataaaatacaaatattttgttccagaaaataaatgaattttaaaattattgggaaataaaagaactgttgattaattcaattgaaagaaaattgtttaatcttcgtctctgtagacaggaacttgtcttgctactggggcagatgatggtttgaagcacctgaagagtatcttgaagaagatgaagtagttgatgatgatgaggaggatgaagatgatgatgatgatgaagagctactagttgaactggtagttgaactggtagttggtaaaccagaacttggagctgataaagaactggtagttgaactggtagttggtaaagcagagcttgaagttgttgaagagctagtagttgaactggtggttgaactagtagttggtaaagcagagcttggagctgatgaagagctagtagttgaagaggtggtggttggtaaactagaacttgaagttgttgaagagctagtagttgaggtagttgaactagtagttggaattgttgaagaggtagttggagtagttgcactagttgttggagtagttgcagttgtagttggtgttgtagcggtagtggttggtgtagttgcagtggtagttggtgtagttgcagtggtagttggggtggtagcggtggtggttggggtggtagcggttgtagttggagttgttgcagttgtagttggagtagttgcagtggtggttggagttgcaggaggttctgtacctaatggtaaattagttgaagaatattgaacaactgtaacggtatcaatacatggtaaagtagctgcagttgcacttgttgctaaaagcaaagaataaaaaatagttaagatcccactgcttttcatcttaagttttacttgttatataagaatatatagaagaaactatattagaataaaatttttaaaagacgaattcaaattagatgggaatttgtttaatttatagatatttagtagaacttggtaaagaattgtaagaattgaaagcaaatgatagtaatttaattaattgtcaaataattacgaatattaatatgttgataaaagaacatgtttgctattttcgcttaataaattgtccgttaattaagttaataatagaatgttcatttaaggtttagattgttctatttagagtactgttgacgattagtattagtattagtattagtatcagtttcggtgattataacattttcttattattattagtttactattccaaaagtaattgaatttattctattgcaattatatatcattgcaatctataccatcgctctacaattactgatggtatactcattaataacattaaacaatgccatgaatataataaacaatgtgaaattataacattgactgttaaacgattaaattgctattatgatcccaaaagggtaatcgcccatattacctaatcaattttaagtgccactttaatatcaatttcgtctattattattaatgttattggagtatatgatgattgtattcagtggataggaatgtttgtatattatattgattacattagtattgtaaggtctggtggtatctacagtttagtggggttagtttaatttagtttaaacttggtagatagcgtgagtatagctgctttctactctatgtatattacacaacacacgtaatacagtaattagaatatatgaaatctcacttaaagagtaataagaacctatgtatgataaatataccttctctaactattgtgttaaaatagaaaacaaatcaccgaaaaaattacgtgtagcatatatagctattgggcattcttttacggaaataagataagatgagttaattagggtagttgagccacctttttaaccatcattgatataatatcattattatatttcacgtgtttctataacattgaaaataaacaacttacagtatgctatgtgctattgccgattaactaaacagattcttatcaaatcaaataattcttacgtaatagtgatttacgtaatagtagattacgtaatacatatacttacgtaatacatggtgacatgaattttctaaatttttcattgaaattatttaatggagaatctgaatttataactgaaagtgaagttttgattattgatctcagtcagggtaacaataacgttaaagatatatagatttatctttcaattatagatatggtgaatataatacggtataggagtttgcgaatattgcaatcatcatttaaaacttcatatcgatataattcaacaattacacaaaatccattgaaaataataagtactttaattgaaggtaataataaattagaattggaatcaatttcaagattatataataaatatggtttacatctgtttttacataatatgataattgcattatttgaacgacattctaataatttattagatttacaaaaatttgatattttatttaatttcataatgaaaaaatatttaaataatgttataaaagattcttgtgattatatatctccatcatttatagaaatggatttggaaacttttgaaaatttacaaggagatgaaaaattagagaaattgttattattattactaaaattatcacttagtactaattcatcatcattagcatttaatttaatgtttaaaattattgaaaaatcacaaattgatgaaacttttaaatcaaatataataaataaacaaaatatatcaactaattgttgatttattatcagtttcaagatctcaaagtcgaaatattaaagaattggataatatattcatattagtttcaagttttaataaatttgttgaaaaaacagatgaatcattaaaatttgaatttacggatgatcaaatattatcaattattgataaggctaaatattctattgaagaacaaacacaaacaaatactgatttaccatttgtatctgtgaatgtaatttcttcaccatatactaccattcaacaagtgataagacaattaggtttaataattagtaaaagagtatcgaaaacagtttcatattatgttgaaagaaatgaaatgaaatgatattaataagacctaccatattggaagataatgatgatcaagaaataactaatgaactaggtaatgatatatcatcagatttaataaatgattataaagttgatgaacttatagataaacaattattaactaaatatttacaattttgttatttcataatcaatgaaagatgtcaaaataatgatccaacagcagtttatataatatggacaacaattaaaccatttcataataaagtttacaattcaattattaattctgaaactaataatttatcaaataatttttattattatcaaacagtttcaaaagtaattacattatttagtaaaaataaacgatatagttcattagttactgatttaatttatgatttaccattagattctgttaaagtttgccctgaattaatgtcaacaattatttatcattgtagtagaacaaataataaatcattagcatcaattgttatatcaagatatgataaaatttcacaagttaaatctaataatactactaaaactttaaatattcaagaattatttggtcaaggtggtgatttaacaattttaggtacaggtgaaaaatttactgcaggtcaaacacatgcattattagcatataatttaaaaattggtaataataaattagttttgaaaattattgaatatttaaaacataaattgattggatttacagcatctgattttaatgaaattatcaaaagtgttttacgaaatgaaaaagttaatgacaatgataatgaaaatgataatgataatgataatgataatgataatgataatgataatgataatgataatgataatgataatgataaaaaaatggataagaaagaaattgcatgggaaatgatacataataatttcctttcacatgaaccagaattaaataaatatgcaattgttacctatgttgatcatatagtaactgaaagtttaggaaaaaatgaacctttaaatatgaaaagaattaatgaaatttatgaattgatggaattacattattctaagaaagatgttaaattttggaatcatttcaatatgatttattttaaatatattataagaaaatatccaataaatattgctaaaatagtttatttgaataataaaaaatttactaaacaaagtaattttttaaataaatcatctattgatattgaacagatttgttattttcaaaaagttgatgaatatggattttataataatccatttaatacacattttaatgatgtaaggataaatttaaatgttagtttaagattaatgattttaagagatttttaccaacaatgtgatggatattttaaacgtgctaaatcattaaatagtgttgatttagatgatgctaggattcaattaaatgaatttgctgattggatttataaagaattaattgaaattaattataatgaaaataatgagaatttaaaatcattaaataagttattaattattgatttattaaggacaactaatagaaaatcacgtaaaattggtattaatattggtgattatcaagtaaataagaataagaataatatatcagattcagagaggaaatatagaattgaacaaggtgaaaaattcccaattggtgaaattacattaaaggaagaatttgatgaatcattaatgaaaaatgatgatatttggaaagatagattttccaaaaactagaaatatagatattaaataaatgatcttgtattatatatataatttatagatattaatgaatgaataataaatagtgaaaatgtaaatgtaaattacatgattatgattaaattaagggggctcgtcaaataatttattggctgattacgtaagtatttttaaatatcattaattgtttctctaatttatgtttaaaatggtatatacccatattaagagccttgaatatgttctaattgtatacgatagtgtttctaatgtagaaaatgctgttttattgtagttttaaaaatgtaaaaatgcaatgttggacaaatatctaggtaaatgtttacagtttttaaaaaactatttatactaaaagatgatgaatatacaaaatttctagcttttaagtcatataaacatatctatacataaaagagtactcctctaataccacctgatacaaaaacatcaagaatgaccttaattacactgttatacaataagcatatatgataccacacaacagaaaacagtgtcataaatattaatataactataaatataccctccctctaaatttccgagcatttctcctactccaccaaatttccgagatgaaaatttttttctttgaagcagtggttattttttttgaaagtgaaattttttttttcattgaaggtgttactatatagaagactgattagttagtgaaatttatatattattcttgatattcttttaataaccaaccaaacaccagccatgtccttcgtcttgactgaaaccgcagcgggttatgcgcttttaaaagcttctgataagaagatttataaatcattctactcttcaagcagatttagatactgcagaaaaagttttatcacaatttaaaattaaagcattttcaaaattttctaatgctgcaaatgcattagaggaagcaaatttaattaatgatggtaaagtctctgatcaactgaaaaaattattagaagaagcaaaacctgataagaaaactactttaattgttgatgatacaaaattagcaaattcaattaataaattaggtttaagttattcagttgtatctgatgctgcaagtttagatattttcagagctgttagagaatatttacctgaattattaccaggtatgactgataaagatttatcaacaatgtcattaggtttagctcattcaattggtagatttaaattaaaattttcacctgataaagttgatgttatgattattcaagcaattgcacttttagatgatttagataaagaattaaatacttatgcaatgagatgtaaagaatggtatggttggcatttcccagaattggcaaaaattgttgtcgattctgttgcatttgcgaaaattattaaaaaaatgggtatacgttcaaattgtgaatcaactgattttagtgatattttacctgaagaaattgaacaacaagttaaaactgctgctgaagtttcaatgggtactgaaattactgatgatgatttattaaatattcaattattagcagatcaaattattgaattttctcaatatagagatcaattatcaaattatttatcatcaagaatgaaggcaattgcaccaaatttaacttcattagttggtgaattagttggtgcaagattaattgctcatgcaggttccttagtttcattagcaaaggcaccagcttcaacaattcaaattttaggtgcagaaaaagctttatttagagctttaaagacaaaacatgatacgccgaaatatggtttaatatatcatgcatcattagttggtcaagcaactggtaaaaataagggtaaaattgcacgtgtattagctgctaaagcagcagttgcattacgttatgatgcattagctgaagaaagagatgattcaggtgattatggtttagaagttagatctaaagttgaaaatagattaagtgcattagaaggtagagatttaagatcaactccaagaattcaaaaagatatgcaaaaagttgaaattactgaaaataaatcatataatactgatggtgatgcaactatggcagatgttaaagaaaaggaagataaaaagagaaagagagatgttgattcagatgatgaagattcagatgatgaagatgctaaagtagttaagaaagagaagaaagagaagaaggaaaagaaagaaagaaggaaaagaaagataagaaggaaaagaaagataagaaagaaaaaaggaaaagaaggaaaagaaagataagaaagaaaagaaagagaaagaaagaaaaaaaggaaaagaaggaaaagaaatagataactatcatatctttacagttttaacttgatagaatatacattaaatttaaattaattaaaaataataaaaaaagtaaaagtactttaattatcattaaaatatttgaaaataccaaaactactcttgctttttttatttgaaattcaatattcatattcatattcatattcatatttttatttcatatttatattcatttttttcttacaattacagtctttattttctatatgttgtcaattacttttataattctataaataactcttatattatatgtaccttttgatgtgttataattataataattataatgaaaaagcgaagaaaagcaaatttggaaatttcacttttcgccaactccgtaattcatgatgggtaagatcgatctctgacacagggagtaagtagatcattaggtatcggttttaattagttaagtatatttcaataattagacaaaaacacttgttagaatgttttcaaatggtattaaactaacagatgaggatgaagttcctcaattaaatccaattttatctaaacatcataataaatctgataaaaatattcaaattgaacaattattaaatagattattacaggaaatggatgatgaaaataatgatattgaaaaattaaataaaatatttgccaatttatcagttaaatcaggtattgattataacttatggaaatcaaagaaaggtttactatcattagaaaaggggacattttcaacagtttctattacatcatcagatgaaatggatacttcaccagatactgattcatcaaatgatttattacaatcaattattaaacaaaggaacaatgcgaagaaaaatgttaattcaaatgtacctattgataattataatgaatttgatgatgatgatgatattatacgaaagaataaggaacgtacattacttttatgtcttttacatcgtgaaaagaaattaaaagctcattatgaatcagttttggcatcttataaagatattttcacatatttaatttatgcaactaaatctagaagggaggaaacttatggtgtatatacagattttcaaaaatctaaaaagcaaaaatcattatcaataaattcaaaaactgcttcatcaatgaaaccaattgaagcaattcaaatatctaaatctctgaaaaatcgtgatgatacatttaagaaaaatacagaatttttaaaatcattagcaaataataaaagaatggagattgaattaacaaagaaagcacttatagaagaatcaagtataataaatgatatcttaagtcaattagatgaatcaataaatgataataatacaactaatgaagtgaaagttgataattgattgggtatttgttttaaaaaaagctcaaaaaaaaggtgtcttatatagtgttttctttatatatattaatgtttttattctttttgatttaatcctgaacctgctggtcagataattcattattatcaatagaattattatcaattgtatgatcacttattttacaacattcatcagttttttgcatctccatttcagattttgcatataatttcttaattatcgttgtaactgtttgatttttatcaatttttttccatttctcttcaattgcttttgaatctgataatcgtattattgcacacataataaaatgaaatcctaaatatactaaaacatatggattatgccatatattagcccaatgaaatttactccaatcaactgtaccatcttccctataatggaatggtgaacatactatatcactattatgattatctttatttataagatttttagttatttctggatttatatctttttgaacatttaaatctttaacaagtttatcaattttactatttaatgtattaattttaaaatcttgtaatatttttaaattattttcaacttctttagttctttgtaataataatcttaattcatattttaatcttgcattacttttattagcatttttcaatttatcttcaagttcaaaaaatttactgaaaagtaaatttgcatcatgtcttgtattattgatttttaaagttttgatattattttctggattcattgattctaatacatataatgaatgtaattgtaattctttaccaacttcaaatgatttttgtaccatacttatttgatatttactctttaattttaaatatttcatagctaatacttcagaagttaaaaattcagatcctgaatattcaaatccataaacatcagaaatattaatctgtgatgacaaattattatcaattaatgaaaatgaggcacatctacgtaatggaatattttcaattggtttactatgaataaaataatgttcctgtgaacaataattattatcaatattagttattgtattataactacgtgatcctaaaatactttgatttcgtttcataaattgactattttcaataattgatgaattatcatgtaaattttctcctttcatgttggtattatttttaaatttgtcaactccattcaatttatcatcaatacttttctcaacacacccatccttaatttctgaataattagtttcattattgggattaatactattcatatcaaggaaatctttcatatttttcttattatccacccaacttgtttttttctctaaaccattggaatttttattataactttcacgtttcattttcattttcatttcaattgaatatttattagcttcactatcaactattggaatactatgtcttcttttaagtcttttagaaaattgtaaatattgataatcaacagatttattactatcatcattataataatttgatgatgtaggttatattactttgagttgataagtgcagtttgattttcaacaaatttattattattattatattattattattattattatatattattattaatattttaacaccattacgttcattatcattttgaattgaaggaactaatgattgtttccttgaatgttcctttatatcatctgaattacttgaatttttcttatgaggtgcctgaccatcaacttcataatcatattcaaatccatcctcatattcataaactccatcactatcaaattcattactattattcaatttatgaacactgttcattcttgaattattaccactaaattcaccagttgagataacatgaggtgatgcaaaaaccgtctttaaattaccgtcattcagtttcttggaatttattctagttttactatacattgaatcagcgtcatcatcagttattgcttcatcaatgttgatcatatcattgtgagattttttagttaatctaaaatgtgatgtaaatgatgatcctctatcctttgatctactattatgacgtgtattactaccacttgatacataatcactatcaaaatcatcatatgtattagcagaatattgacctctatctaaactatttaatttcattaaatctgatttcccactagatgtggatttcttgtttggagtatatgttgatatatcattattaaattcttcaatataatcatttttatttttatgcctagtgctattttttagtttactcttatattcatagttgtattcgtcatctgaacttaagtatggtggtgaaactattcttgaacttttcttaatatgctgattaatattattatcatcattatatgttaatgaatttgatttttgttcactagttttttgattttggttttgattttgattttggtatttttccctattttccaaactcatagaatttgattttgatggttttgattttaatttagttttagatttaaccctatctttagccttcgtagattcactatcacttacaatagcattttcataatcttttgaattctcaccatcaaacaggcctaatgttgcctgtgaaatatttttcagatcgaaaaatccgtttatattagaattattatttaacggtggtaaatttaattgagatttcatctttttaacaccatcaagtactgaaattgaatttgttgaatttgctaattttctatttgcttcaactgctaaaatatttttagacatatctattggtttaccattacctttaaataaataatttaatgatttaccaagggtaaaatttgagaaatgatcaatattttgacaattaattaatttaccttgatcaaaattagtatgagaatgtaagaaaaatggtgaagcacttgcattttgagcaatactttgtaaatttttaccagatgtaatatcaataacagtatttttaacaatttttttcattttacttaaatcttttgttaaattttgtgaagttttaatactattcccccaatcaattaattttaataaagtttcatgattaaagcaagatgtttgttcaagtttaaaatgtttttgaaatcttaaaattgttaatttcatctgtttataatcaagtgaatcttttggtacaccaaaattattaccaccaatttctaataaatttctacataagattgttataccaacaatacctttaattgaatctgagatattacaatttggaggtttatcctttaacatatttaaagccattgggatttcattcattattttccaccattcattaattgcagtttcagttttctcacagaataatccatcacaatatattggatcaataaatccataataatataagaaaatttgagttgtataaattaaatttaaaactgaataatttattggtattttactatcaattttaaaagttgatttaaatttattttccattgatttggatggttcatcagtagttgcagctgaacgtgaaccacaacctaatttttttaaattataattaaccataaataatgtataatcatcactaatattaccagttttagcatcaattaatgataggaaaggatttaattgtgcaagattagtaataaatgcataacccatagaggtatcagttggaacataaaatggagattccaattgttctaccagataagaaataaatttcaagggccaatgatcatacatattattttgatttgattgatttgaattttcatgtatagatgaaggttttttatcagatgataatgataatacatgatatgcaactattcgatcatttggatcaccagtatatgtaactattaatgtattatttgatcttgaagcaatccattgttcaacaaaataagcttcataacctactaattcaaccaatgtaatttcaaatttagaattataatcaggaattgatttaaaatatggtttaatcttatcaaatgcaacaatatcaggtattaaaaatgatttatttttaaagaaatcagcatatctattccaaggatttgatgcagatcttgaacgtgaatgaggtcttgaacgtgaattaggtcttgaatgcgaatgagctcttgaacgctgaccaccattgtcagtggggatacttagcttctgcatttaaaccacagaaaaagctctttgtcctggtctctaagcaacctcctcagaatgcatgttctgttgttatcagattggcatgtaacgggaaactttataaaaaatggcacaggattacgtaatcgggtttccaatggctgaggagggcaatttgcaattgaatttttagaaaacaagtgtcctattagagagtaacaataaggtaataaacattgattatccgtgtctctgcatagttagatcaattgaagagtgtaggagatagtgagaagtgatggcctcagagacacttgcagatgaggcagtttttccgtatgttattcacccccaattggcagatattttacatattcatatatgattatatgatataacgattattgaatattaatactaacatataggtttcaatttcattggtatttttcatcaattgtactcttccaacatatatggagatgtacaattactggaatttatacttgtatttatcaatgaaatagttaaatactcctattaataaattataggctcagcggatatgtcccttgtacaattttacattccaactgaaattgctcgtgaatgtatctctctattaggtgatatgggtgatattcaatttagagatatgaataaaaattcaaattctttccaaagaccttatgttaatgaaattagaaattttgatcaaactattagacatttaaaatttttaacaaatcaaatgaaaaatcaacaaattagaattattccagcagattttgatcatttaattaagaaaccttccctagattatgaatttttcttaagagatgatgaaactcatttaacttcaggtcaaattgaggaattattagttacaattgaagctcatcaaattcgtacaagagatttatcaactacaaatgatttattgaaaaaggaaagagatcaattaatacaaaatcgtatggttttacaaaatactagacaattctttgattcaagattatcaattgaactggatgataatgattcattatttaatcaagttagattatcaactgaatcaactaatgatagttttatgatatctgatgacgaaaatgatctcattaataccccaattaataataataattctcaaaacaatattcttgaagcaggtacatttaataataataatagcaacaataaaatcttttcaacaggtagaaatgaattaaatattctaggttcaacaatgaactttatcagtggtataattgataccgataagtttttaatacttgaaaaaatttgttggagatcattaagaggtaatttatttataaatagtgttccattaactgaacctataacaaatttgaaaactggtgaaaaaacttttaaatcaattttccttattttcacacatggtgatactttgattaataaatgtaaaaaaatcatagaatctttagatggtgaattatatgaagtttcaagtgattatgaagtatacaaacaagaattggccgttgtcaatagtaaaattaaagatttaaatcaagttataatgcatactgatgatagattaatgatagaacttaaggaaattgcgtcaaaagttgaaaaatggaaaatattgattaaaagagaggtttcaatttatgaaactttaaacttgtttaattatgattcaacaagaagatgtttgatagctgaaggttgggttccatataaggatacaaacacagttgccctagcgttggaaactctcactaattcaattgattcaaatttaagtattgcagtcaatttaatgaaaacaaataaaactccaccaacttttcactaggactaataaattcactgaagcttatcaatcaattattgatgcttatggtattgcaacatatcaagaagttaatcctggtttagcaactattgtaactttcccattcatgtttgcaattatgtttggggatttaggtcatggttttattttatttttagctgctctggtactagttagatgggaaaatgttattggtaaaatgaaaaatagagatgaaatttttgatatggcttatacaggtcgttatattctattaatgatgggatttttttcaatgtatactggattgatatacaatgatttattctctaaatcaatgacattgttcaaatctggttggttatggcctgaaaattttaatgctggtgatagtattgttggtactcaatccggtgtatacccatttggtttagatcctgcttggcatggtactgaaaataatttactatttaccaactcatacaaaatgaaattatcaatcctcatgggatttattcatatgtcatattcattttcatttgcattagttaattatagatattttaaatcaagagtcgatattattggtaattttataccaggtttattatttatgcaatcgaatttttggttatttaacaattacaattatctataaatggtgtgttgattggattgcaattgataaaccagctccaagtcttttaaatatgcttattaatatgtttttatcaccaggtacagtagaggaagcaattatatcccggtcaaggtccaattcaagtcatattagttataattgcattggtttgtgttccttggttattactttacaaacctttaactttgaaaaaattaaatgaacaaaagataaaacttggttataccgatgttagtacacatagtactgaaaattctagattttctattgaatccgttccaatttcttcaattgatgacgattttgaaattaataatggtgaaatagatgacgatcaacaattattataccttgaagatgaaaatggagaaaatgttgaaccatttgaatttggtgatgttatggttcatcaagttattcatacaattgaattttgtttgaattgtgtctcacatactgcatcatatttacgtttatgggcattatcattagcacataatcaattatctgttgttttatgggatatgacaattgctaatggatttaaaccatataatgaagatggagttattggatcgataattgcatttttattatttggaatgtggtttgttttaactgtttgtattttagttgttatggaaggtacatctgcgatgttacattcacttagattacattgggttgaagcaatgtcaaagttttttgaaggtgaaggttatgcgtatgaacctttcagtttttacaaaattattaatcaaatgtatacagctgaattcgaagctgaacgtaaatagatagattttgtttatttaattattcctatttataaattatataatttatgttatatagatcgtagaaccattatgaacattcatttttttattaacatttctcaaaacggaaaaacaaaaacaaaaaaaatggttacatgaatctataacattacttcttttcctagctacaacaatgattcgttctacatcgtatcatcaattgaaccgcaagagtgctgactctaaaaaggatgaaagattgatatcaagtaaactaaattcaactgtcaaagggagaaaaaaagatgttatagaaaaatatcttgaatctgaacatacagtgttatcagcaagtttaacacaattacgacatacaatcttatgtgaacaactcccctaatccatgtccatatcgaagttatgtatggtctacgctattaagagctgctccagttgaaagtgaatggtatagtggtgttgtatctcgtggtccatctgatgttaatgaaaagattaagaatgatgtatttagaacgtttcaaaacaataataatttttggaataatgttaatgaagatgcatttgttagagttttaaatgcatatgcttggtgtgttgatgatgatagtgttggatatgttcaaggtatgaatgttttagcagctccaataatgtatgttgctaaaagtgaaccacaagcattttcattaatttatcgattatttaatacacatttatcaaggtatgttacaaaaactttattaggtgcaagagatggtgttaaattagtggaaattgttttaaaatgtgttgatgttaaactttacaatgttctgaaacagagaattgcaagtgctgatatgtatgcattaccatctattttaacattatctgcatgtacaccatcattggatgaagttattaaattatgggattttctgtttagttttggagttcatttgaatataatggcagttgttgcacaattatgtttaatgagagatgaaattattgcatctaaaaatccaatgaatatattaagacaatttaaagaagtaaatgctgaaaaaattataaagttaacacttagtattacaaaaattatatcagatgatttatatgaattgattgttcgacatacttatgatgatgatgttagtagattaattgatcattattacattcagtgatttgtattaacactttttttaccagttgagaatactggtgatgactcaattcttttataatctagttcatctatatacccacctagaattaaccttccattgtaagttctaccacataatgattctaaacatgcagtagagttctttgcatcatcgaacttgatatataaacgagtgtactccggacgtaatgacatcgattgttggtttgaattctggtgtaggtgcaaccaacataaaatcaacaaaccctggcattttttgaagttcttcctcaaatgtttcaaatgttttattataatgaaaatcattaattgaatctgctagtgatattatgtttatcaattgaatggttttggtgatatcatgagctgtaacagtttcagtttttgcatcaacaaattgcctcaagttacgtagtgtgagtgtttctgattgtttatattttgaataacatggtaatgaaaaattccattttaaggtttttgacatttcatcaatgatttcttggattggcttttcactgcttttaaatgagaaaaataaagtaccatttgagtcatacgataatttatctaacaaacacacgaatgagtaaagattcccatattttgataaaatagaaatatattcttgtgttgaaagtacctctgcattgtttgcacagataagtgatgttttattcataattacttcagcaggtcccgagtttgctgtactttctgtagatgttttattattatttatttcagtaacttgggtaaccttatttgcaggtttatcattagtttcaccagattccgtcttgagggtctcttcccgattatttgattcaccggtttccttatcatttgcaggagttttatcagtagatttaatatcttcactactaccattgacaattgcatctgcaacatattcgggatgtctttcaactataaccaccttttcaccaattatttttccatttaatgacatcaaagtagttgcaatagtatcattgacacattcaacaactacaatatcgtctatttcttcaaaagttaaaccaatatcttcatatgatacaccaggaataactgatgatgtgaggaaatcttccatgtaggatctaactgaacttagttcaccatttttaacaactatcattcttgaatataaagcatttgtcaatggaatagatacaacaggctttgcatctttacgaacacgttccaaataagcttgtttatctaataactccttaatcttttcatcagtgaaatcttttaaaatatttgaagaagcagtgaaaagtccaaccgatttggcaaatcttgcagacataccttttactctatcaggaactatatcccataatgatggatttggatatagtgttgctaagggaggagctttaaaattttgtctacgaccatctctttgtctattatcatatccattttgttggtatcgacgtctatcatcatttctacgagtgtctctctctctttcacgatatggttcacttctacgatcatcttgtctgtgaccaccgtttctataattggtgtttctacgactttcacttttatacctatcctccatatacctattatctctatatctattatctctatatctatcatctctgtatctattatcattttgttgttctcgtggacctcttggaggttcatttcgattatactctcgtgatggaggtaatggtgcatccatcacaccggatggttttgttggaacattggatttgttttcttgatatcttcttctacgatcgttaaacattgtccccagcaacccttagtttcaacctatatcaaaagaaagaactaaacaattgaagcttctttaagtttggattaatttttttattgtttctctatttttgaaaatttcatgtcaccaaaaagttcactttacttaacacatgtcctttcacgtatcgtgttttcttttaagattatatcaatcaaaggatcaattaactactaaatatacaatgaaattggcatacatactatcatttatagtggccgtgaatgctgcattacttggaatagattttggtactgcttatacaaaggcaattttagttgcaccaggtgtaaattatgatttactattaacacctgaatctaaacgtaaaagtgttgccggtttagcaattaccaatgaaggagatgatattattagacattttgatacacaagcacaggcaatgtgtgtcagacgtcctgaatcatgtattatgggtgttaaatcagcattggatgaggaaggaaaagtgaatgttgaaatagctgcaatgttattttctgaattgaaaagaagagctgaattacattggaaggaaacaagtgaattagcaggtagtgttgaagatgcagttatatctgtacctgctcattggaatgcaataactagaagttcaattgttgatgctgcaagtgttgcaggtttaaatgtcattggtttagttaatgaaggtttagcagttggtattgattatgcacaacgtaagggtaataatgcagaagaattaatacctgaggaatatcatcttgtttttgattgtggtgcagatgaaactaaagcatcattaatttggatgcataataatgtttcatcaactagtgttgaattagtcaatattgcaaacactgaacttgttagtggtaacgaatttacacttgttgttagagacatgattttagatattttaccagaaagtgcacgtgatgatgctagagttatgaatcgtgtttggatgtcagctgagagagcaaaaattgttttatctgctaacaatgaagcccgtgtcagtcttgaatatcaagatgttgattataatactgttttactccgagaagaatttgagaatagagttggtaaaaaagttaatgaatcaattgaaattatgttagatgaagtgttgaatggatttgaaggtgaattaagttcagttcaaattgttggtggttccgtacgtgttccacttgttcaaacaaaattatctgaatattttggaaatattgtttcaaagcatgttaacgctgatgaaagttgtgtttttggtactacttattatggtgcatatttattaggaattacaagaaagagaacagttgatattattccaagttcaattcatcaatataaattccaatataatgctggtaatgtaactgaaatgtatatggaaccatttgaaatggaacacgttgatgaaatttttgttaatataattgaaaatgatcaaataatacaaaatgttacagtcacagttccaacttttaacaatacagctgtttttggaatggaatttgatttagatccaattggtactgttaaaattgtttcaatgaaaatgaatgagacaagcttaccaatgaaatcaactcgtttaggaatgagtgcatccgagaaatctacaatttcacgtaaactacgtgcaatggatacaggtgatgttatgcgtgaaactttagctgaagcaaagaatcaacttgaagctgcattatacgcattaagagaacttggagataaagagtttgttagtgaacaattagaatggttagaatatgaagaaccaactttagaggaagtttatatcaaacgtgaagttgttaataaaaaaattgactcatatttaccacatgtagttgaagaagttgttgaagaagttgtcgacgacgttaaaaaaacagttgataaagaagaagaagttccagaggaaacaccatctcatgatgaattgtaaacattctatacatttgtaaacttatatattaatactaattctaattccagtaaaagaaatgacttgaagtatcaaccctataaacagttttacaaaatctggtcactacttaacacactctatacattaaaaggtatacagtcaattttttggattaccggattgaataactctcactgacagatgttctatttttgtagacccaaaatagcatataaccttcaaagttaatttgatgtattaccggagatattcctgcgatagccaaaattgttttactgagtttagcaatcgaagaaatagcacctataataaaatcaaataaccataagctaaaatttctgtatcattaacagttaatagtatttctctggattctcaaaagcaacgaaaaatataagcaatcaatacaacaccaatatctgtgtagaatgattgattagtaatgtattgcttcaatggttttgaagtaatttgtattctctatcagataaaagtaattcggtaatttcatttaacacgtaagaatgcaatctttttgtaactaaccttaaaataattaattacaacaagatgtattcttactattctgtcaacccagctgcggagttatcaaatgaaattaatgaaatattgatgtccgatattatgaagacaaattacatctgatcgcaataagaaacgagagaataagatgcttgaccgaagacagcacaaaagctgaagaagctacagaaaactctaattataaatcgatgtctgaacaattttgatgaaaaatttgtataataatgttgagacaacgattaatatcatcagagttaaactgtaatatatagcttttttagcatcttattctatcgtttcttattgtcatcagatttaatttgtcttttaaatcagaagtaaagagttaattattttcatttggtaactcagcaattgaagaagttgggttcacaatgttgtaagtattcatcttgttgtaatgaattattttaataagttaatatgtatatgataatacaaaaatagattaagtttatttacttgtagtatcgatagaacaaaagatatttgacaaaattttcaccgaaattctaatgattacttataattgagaacccgggttttcgacaaaaattattggtttgaatcacacacggttgatattttcagcaactttgaaaagtctaatactctgatcaatgttgatatttgataaatgtttagattttaattctttatcaactgaattttcatattgaacaataaattctaataattcagaaaaagtgatgacatattttgaaacagtgagcatatcttcagttttaatgatttttgatttaaatagatatgatatcaattttcttccaaaattaggatccattctagcaagaaatttatcaatcttttgtttctcagataagtaattcttaactggatggaaaagtgataaacaatcaatatatgaaagtaacattttaacagcactaacattattgtaattaataccataccttatgacaccaaaagcattagcgacatctaaaaaggtatttctagagtcacagtgataataacgcattttttctaagattgcaaacattgtacctgaataatcaacaccaacagagttaaaaaatttctttctaccaccagctttattgaagctattaaacataatgagggcaaactcattaacggtatcttcatcaatcttgttataagcatcctcatcgtacttttcaaaagcttggaagacttttgcataatttttaccataagttttatccattcttattaatgattgcttaaagtataaataatatctttcaaacatgccggaatcgggtgtaaaaagatcaatacctggagacacaccaattaatagattgatcttggtgtctttaaatgattggttattcaatggagagttgatttcgtttcttcttttgcagttgatagatcattctcaacatcatcatgatttgcttcagaagcatcttcaaagttaacagagttgttgagtgtcatctatatatcaacttataaactaacttgtttttttcttctggaaaatatttcctaaacttaattaattgatataagcaaccctatattatttcaatattaaaggtttatcagccattttctgttttaataataaaaatcttacgtaacacgcatgattaatgttaacctttcagtttcttttatgcaccatagaatgacaatgattgacagtgaattattaggtccactaactaccataacaaatatattatctagaagacctggtccaataaacttatcaggtctacgacgtgtttcagaaacccatgattttacaacattcgtagagaaaacaaaggaaggttttataagagtcagtgttacaggtgcagttttcgttgttgatattgatttagatgataaagaatcagttattgatgcaactgtatcagcagctggtgaaattgttgatgattgtgatttagttaatggatttggtaattacactatagcttcagtaatacttaaagatcttaaaaaatcaacattacgtgaatatagtgaaaatatacgagcattacaggtatgggatgcattaggtgaaaattatcccttaaggttagcacaattatataaagatattaaattgaaattatcaaattctattactgatatagaagggaattcagatggtagaattggaatatgtgggaagtttaataatggaaaaagtgtgatacgtataaatccaaataatatagaattttggccatgtatttgggtaccagaggaggtaagtaaattaataaatggacatgaaaagcttatatgtaattccaatgataaatcaatgaaggaaatttttgaaaaggcagttcaattccgtggtgtattatgtgataccaagagagtttgtataatttcatcaaagtttgttccaatagagatggtagattatcagaaggttgaagatatagttaaaatattggaattattacaaagttggcaaaatgtttcaaatatggttcaatctgcaaatctggatgaggaacctacagtggttgatattgatttaacaacaattgaacttagtgatgtttttagtgaagttccagaaaccaagaaggaaacagaagttttggttactgtagctgttgatggatcagcaatcatcaaatgttaagcttattttatatatgataaatttataaaatacttacataggtaaatatagccataactaaattctattatcgccagtaaaggtttgacccttttcgaaatgatcaaatgccaatttcattttaaataataaaactgaaattatgaaattgcaaagagaaaatttagctagactacctattaaatctggttcacttcaaatgaattaataataaaattgaacagaaacaaattggtttttctaaggttaaaaaacaaattactgaatcaacaaatccgatagataaatctaatagtacagattcttctgaaaaacaatttggctcttttaaaagaagagttcaaaaaggtaatactttagaagtatatcaaaaatctccagatggtttaaggactccatatatgttgaaacaactagtaaattttatgttgatttaaatgatcaagaacgaaatcaaggctcctttgttgatagaactgcattttatactaaatttctaaataaagaaaaaaatatcaaagatggaaatgataacaatattttatcagagatcgacgaagaggttttagttgctttagcaccggtttttcctatcattcataaaattaaagtagtcaccgattttagacagattaataaatctttgaaatttagaactgatgctatccatccaattcaattgttgattcagaacttaaatggttactttcatttcacttcattagatttgaagagtgcctattttaacgttcctcttggataagaatggttccagaattggtaatactacgcaatttggaaactttgaatataaaagattgcctttcgatttagctagtgctccagcagtttttaaaagatttatgcagtttgtcctcaaagacattcagtatgaaattgcattatgttgggtgttatcttgatgatattatcattgcatcagttggtaaggattcacatttggaattagttgacaaaattttaacaatattagacaaatgcggattaacattgaccgctaaaaaggtaaaattgcctgagaattcaatcgagtttttaggttatttaatcaaagatggtaagagattcccaactgatgaaaaggttgacactattaaaaattggaagttgcctacacctatgaaagactggtataagtttattggttttgttaattttttaagtgctttcattccagattgcgctttattattgaaaccattgtatgaacatcattcttgtttaaagtcaaaaacgatttcaactgtggaggaaggtgtatcatatagaaattttgcccttattaaagaggccttaattaattcaactggcttacaattatttaatccaaatgaaactctgtttatttatactgatgctagtgatctgggtgctggtggtatttttctgcaaaagtgggagaaggatcaaactaaattaattccaattgccttttattctaaatcgtttaccacaacccaacagaaatattcaacattggaacgtgagctattaggtattataatggcattaacacataattacctattactttgaactgatatcgttgtttttactgaccataaggccttggctacgattaatcaggtaaactgtccgttgaataacagaattttaaaatttttagagatattatcaacatatatcctctacaaatcaaatatattcctggggatactaattatgctgatttcgttagtcgtttttcaattgttgatcaaccattgcttgatattaaaaatattcaatgttgtgcagttcgtgttttaaatatgatactcccatccaacctagaacagcatgtgcccgttggtcaaatagagcataccctaaggaagaccttctaagaagaagtcatagcattcataaagcaaatttgccctcagtgaaaagcaattccacaaaaacaaatatgataatattaggtaattcaaattttgctgatatttttttttttttcactgataattttcattcataatgattggattagaatgatctatattaacttaaatcaatgtttagattgagacgtcttttatctacaatgacttcacaaggtaaacaggtaacttctattccaaatggaatagtggaggcagattatgatcttttgaaagaaggttctgcaactattttgtttccaaaaaataatgtcttctataatccagttcaacaatataacagagatctttcatctttagctattcgtgcttatactgatattttacaaaaagaacaccatgcaaataaaagaaataaacaacctataacaggagctaaaatcccacatagtgatgaaaagaaacatagaaaggtattagatgaaaataaggctgctgctacaactactactaatggtgaagttaaggaatctacctctactgaagaaacaaagacagaagaaactactacaacaactgcaccatttgttcatttacttgaagccctctctgcttcaggtttacgtgcaattcgttattctaaggaaatacctcttttacaacatattgttgctaatgatttatctaatcatgcagttaaatctattcaacttaattgtgattataataaaactcataatgttaaaccacaagaggcaaatgctataacacatatggctacaacaccatctgcatatcatgttattgatttagatccttatggtacagttgcaccatttattgatagtgcaattaattcagctaaaaatggtgcattattattaataacttgtacagatttaggtgttttagcaggtaatggatatccagagaaatgtttttcattatatggaggtgttaatgtttggggtgatgcaactcatgaaagtgcattaagattagttcatggtatgattgcacgtacagctgcaaaatatggtgtttcaattgaaccaatgttatcattaagtattgatttttatgttcgtgtatttgttagagtatggcataaacctattcaagttaaacaattaatggcagcaaatgaaatagttgttaaatgtagtggatgttattcaacaattaatcaacaaatgggtaaaatgtcaacaccaaatgaaaagggtgcacgtaaatatggtttagctaaaatatcaagaggtgtatctgataattgtcaattttgtggatatacaaatcatttatgtggtccaatgtggggtggacatttacataataaagattttattaaaagtattttaaaattagtaaatgaagaagaaaagaaagatgaaagtgtatatggaacattaaaacgtgtacgtggtatgttaacaatggcattaaatgaattaggtgattcaacagcttcagaatctgatattcgtgattcacaattttattttgcaactacaacaatttcaagagtattgaaaattcctgcaccttcattagaggattattctgctgctcttggtaatttaggttatgatgcatcattagttcatgaagctgctaattctataaagacaaatgctccatggaatgttatttggtatattggtattcaatttgctaatagagctaaagttgatgtttcacgtttaagtacttcaactgcaggttataaaattctcacaaatgaatcaatcattaatagtgttgatatcaaagatgctattaagaatgcaaagaaattaactgatgaacaagtatctgaacttaatgaagaaaaaattcatgaatggttattttctgcaaatgatgtaagtgcaaagattcaaaaattacgtcgtattaaaattacacgctaccaagagaacccaactaagaactggggtccaaaagcaagacctaaataagcattgtatagttgttaaatagttaaaagttaaatatcaataatagaaatgtacttataatttgatttgatttcgaatcctaaaagcgtattttcaatgtaacatgaatatcaggcattcacaagttgaaaatacaggaaccatttattgttcatttatcattcgattgtacctgagcgatttacatcataatcacactcaattgatataatgtcaacacgtacagcttttgtggataaggagatcacaattatagaggagattatcaatatactggctaaacctaacaaatatgggatatcggataaggagatgttcacagttctgaatagttcatcatcaatgcttgataatatcatcaatggacctaaactttcagaatctccatcaaataatgtctctacgaaaatgattgatttcaaaaacttggtggctttaggtcaattattagctgataaaagaaatataatcaatacatcttcatctacaaatccgaataagaatgtcgatgacatgaataatgcagttagagtattgaagacaatttatcaaacattgagtacaaatgtttatatcaatcatgtaaaaacaccttcagtaagtgcagctgtttcagcatcagctgctgcttcgggatctacatctacaagttggtggaatataaataaggctaatttacaattaaccaattcaactgatggtagtataatatcaagtactaatccacttgaaagtgttgattatttcccagatttaagattggtcttgaaaaatgttttagttactgttcatttcatttttgaaaagatatcaagatttaataaacagcattaaagaattatcagagaatgataaatcattgattgttttattgcgtgatttaatgttacttttgaatgtatccattttgaataaattagttgaaatattcaaaatgttgaatcctaaattatcattgaaatctgaacgtacaatgttcgatgtttttaaataatagtacattttcatttttattttcattattttaatactgttttataaaagttatatttatacatagacacacatttcaagaaccataaaaccatccggcgaaaatcccccatatacgatgtgcaaaacgacgtcctaaaaacttacctgcaagtggaatcaaaactaatgcaataacaatttgtaattgatgaaccatattatcccattcttcattattgtttccatcactagaataagtataaactgaacaatcatcatcagtttcatattcacttacatcacttgtattttgggttgtttcttcattatttgcacttgctgatttcttttctttgagcagttttagatgagctaactttgcaagtcttcttttagcttctcttttcaattcttcatccttaattttaatcttttcaaattcttcagatttcttttctgcttgtgaatttgtatcttctttgtcatcttcgctgttggatgggattgatgctgattcctgtgaatcttcttgaacaatttcatcagtttcgatatgttgtttttcagcttcaagtttactttcttcatctttctttatttgttcctcagtttctttgattgtcttttcttgttccaatctttcttcttcagctttctgagccttttcttcatcttctaatctcttcttttcagcttctttagctaacctttcatcctcaagttttttctcaagtgcttgtttagctaatctatcttcttcagcctttctttcttcaacttcttttgctaatctttccttttcaattctttcttcttcggtctttctttcttcagcttctttttttaatttttccttttcaattctctccttttcaagtctttcgttttcaagtctttcgttttcaagtctctccttttcgagttttgcttcttcagcttcttttgctagtctttcttgttcaactctttcttgttcaattctctctttttgaagtctctccttttcagctctttccttttcagctctttccttttcagctcttcccttctcctctctttccttctcctctctctccttctcctctctttccttgtcaagtctttccttttcctcttgttccttttcaattcttgcaacttcagctaatcttgcaactatagctattctttccttttccagtttttctttcttttccttctcctctgcttctttagccaatttaacctctttagcttttttggtcttttcagaaactttacttgtaccatcttcatcaactttatgatcttggctttcagcttcttgactcacattctctttttcatcaccttttccagttaaatcaattgccttctcgctatccagatgtttatcagatacatcttgtttattaccattagtctcggattcatgtaaatgtttggaatttttcaatttacgttcatgttctctatgttcccataaatcatcattttcatcatcttcaacttcctcctcatgggcaactttcttcagtttatccagtttactcagtatctgttgatcaatttcaccaggcatggttcgattacaccaataatataaatcaaagaaagtatactttcctatccatcaatacaaaaaactcggcttaatttgacatttcaaaatttcatgtcctcaaattttataaatgattccacttctggaacttagtttaactttacttttatacaacttcatttttaattactctacaatcaattgggtatattatacttcacagttataatcttatggacatgtctataaaatatcaaattatctgtttcatttaacaagtctaccaattttaagtataaattcatctgcttttctactatactcctggtagtcaagaatttctttccttatctcttttttctctctaatcttcttagcttcagcagtttcagcaaatggtacagaaaactctctaaataaatcatttttctcttccattaactttctttcttgtctactaaatttatttactattgcaagagcttccatatatctgtcattcaaactttttccagttacttcatcaatagcaaatatatcaatttttgattttttcttaggtggttcttcttccattttctttgattcagtcttctttgactcttgctttgacatcttttgttcgtgtttaacacttgttgatttaacttctttcttcttattatttgttgcacttgattttgaactctcagctaccttgagattttgttcatcttctaatttcctttgttccttgtaatattgtgttgctctgtcttctaaataattagaaatttcatcacccaatttaatttctttattaggacaacaaagtacttgatcataggcaaatatacaaccaaaaatactaggttccatttcatctctctctttcaacatttttattctttcaatttcatcttctttggcaaatttagcttccctgatctgttttgcttttgcagtttcatttgcaggaatttgacgtttcctttgtattgcttttttagcagctgcttgatgttctttatgaagcccgttttgtacaaaatctttataagctaaagctaaagctttttgaagagattcttcagtatatttggcgctttttggcatagttaatttacctttctttgaactagcattggatccagattttttagcttctctttcttctttgtctttactggcaaataatgcattaagatgctttttgaattctggatcattttcccttgaatatggctttggttcagcttgtctggctttcttctccatcattgctattttctcattcttttcacgtgcattcttattatcaattatcttttgttcattagtcttttttgttgaagtaccagcagtattagtggactcactatcattttgagcttgcttttgctctgctaatttaagtttttgttcaagtcgtttaacaaagccatcagctggaccgggttctgattttttaacatcatctgcttttgttctgactttagattcagactttacagatgtttttgttgactcagtaatgactttagctttcttttccaattcaacatttttagctatctctttctgttcttctaatgctaattttttggctaatctactagcaaaactatcaacatttaccactgacttactgttactcatacccaattaaatctttttgggagaagatccaatgaagaaatataaaatgacccaatcttcaattaataaattaattgtgacacgaacatttcatgaaaaactttgaaaagtcgccaaaaattgcaagaacctcctcccaatgactactgtccaaaagtacaacatgacaaaaatggtaagcattcatatgtagcagcagctagtcaacgccttcctacatgaactccagatgaatacaaactaagaagcaaaaagtttcaagacaacctgtacaaaagagttaaacaccaagttaaaacaaacacaaacattgactgtaatgacagatggaataaaatacttgttttaaccattagatgataatatcttaattcaaagaaacataagatatacaaccaattgagtatattatacttcacaattataattttataaacatctataaagtatcttaccaatttgaaaatccaaaaattaactcattagctttcattatatctagttttcctctttccctacattcatcttggtctttctcttcttgatcatcctcttttttctctctaatcttcttagcttctgcggtttcattagctggtacagaaaattctctaaacaatgcctttttctcttttcttaaataattttcttgggttgtaaaatcacttattttttcaagaacttcagtaaacttgtcggcagttgctttcccagttttatcatccatactaaataatttggaaattaaattttcatttactggtacttcttgcttcttctttgattcaaccttctttggctcttgctttggtgtcttttgatcttgtttattacttgttggtttaatttctttcttattattattattattattattattattattatttttcaccgttgtcttggattccaatttcccagctgccttgagttttttttcatcttctagtttctgttgctccttgtaatattgtgttcctcttgcttttaagtattgaaagttttcatcacccattttaatttctagactaggaaagcaaattacttgattaaaagcaaacatttctccaaaatgttcaagctccatgttaaaatctacatcataatcatcttgaagtctttcttgaactaaatcctgataagcttcagctaaatctctttgaagtgattcttcagtatatttggcgctttttggcatagttaatttacctttctttgaactagcattggatccagattttttagcttccctttcttctttgtctttactggcaaataatgcattaagatgctttttgaattctggatcattttcccttgaatatggctttggttcagcttgtctggctttcttctccatcattgctattttctcattcttttcacgtgcattcttattatcaattatcttttgttcattagtctttgttgttgaggtaccagcagtattagtggacttactagcattttgagcttgcttttgttctgctaatttaagtttttgttcaagtcgtttagcaaagccatcagctggatcaggttctgattttttaacatcatctgcttttgttgcagttttggattcagactttacaggtgtttttgttgattgagaaacaggtttagctttctttggctcatcaaccgttttagctttctctttttgttcttccatttctaattttttggctaatctactagcaaaactatcaacaattttcttggatgaattaagttctttttctttctttgcttttgatttcatttcttttttcatttgtttttccttttcatcatatctcatagtcattgcttcaacttgtcttgataaaaggaatgattgttcaaattttttagttctttcatcatcaaattctgcattaggatctaaaccataaagcatattggccatttgagatgaattcaactcatttggattttcattttcctttgatttactgttgttcatactcagttaactcgctgtaagagaagattgaatgaagaagaacgtttagtcaatcttcaatcaatttacaaagattgtgacacgaaaaattcatgaaaaaatttgaatgtcgccaaactctgaatttcatttacttcattaaggttattaatatcaatttctaattctaccctatataaattaaattaaaataaagtgttatacataagttctatgcattataatcaataatcatcatcactgaattccgttttagattcatgtagttcaaagatagaacttcccaatgccatttgttcttcaaatgcctttgatttccattcttcatcttccttttcatcagcaattctttccttttcttctctaattttccttgcttcatcagtttcaccactgtgatcctctaaacttctcatatattttcttctatttattctaatttcattttgttgtttttgaatgtgctttaatgtaacaatatattcatgagttccacctatgatttgcaatctaagttcattatctcttgcatttaattcattaaatttacggaatataatttgatcgatttcttcatctgttttcttaccatcatatttctttataattttatctgaaattattgccattctattttccaaactgactatagctggatttctttcatgtgtatgattttctggtgttttttccgttacagttttgtcatttccaatatttttgtgttcttctaaagctttttgcttttcaagttctttaattttattttcaatttctctttgtttttgtaatgcttttcgcttttcaagttttctttgtctttcaagttctttttgtctctcaatttctttttgtttttctaactctctttgcttttccaattctttaatttgtttttcaaattctttttgtctttctaaagatttttgtctctcaagttctttttgcttttcaagagctttttgcttttcaagagctttttgctttttaatttctttttgccttttaagttctttttctctctcaatttcttctttctctaaaagttcatgaagttcagcaaaccgatttttatgtttttcaaaaacaagtttcataagtttatcaaattgttcagctttctctttgtccaatttttgattatctaattcatcctccttagcatatcttgctaaccttttctctttttcctcttcagtttctgaaattgacgcttcaagttcccttgtgaaagatttttcactttccattgtagcttttttattttccataattttgtttaatttcaaacctgcttcatcaagttcaactgccatatcaattttaatgtcttgatcagcctcagcaagtcttttatttcttccaagaacatatgcttcttttttactgatccttttccctacctttttgacagaagaagttactttgttcttagaagaatctttattttgtgacttttcatcagcatttgttttttcaccatctttatcactatttttctttgaaaaattttcataatgttcaagtaattcatcttcattattaagatcaatagttctatcagaaggttgaccaaattttttaatatatttgagagcatattgtgttttaaatctcttttcaatatcaaaataaaaatcactatcaaaatattcctcatcgtcatcttcatcatcttcttcatcatcatcatcttcttcttcttcctcttcatcttcaaattcaatatcattaacattgatcattcctgtatttgaagtggtcagttttggttcctcaatagtcttaatagttgcagtagtacttgtaccttggtttgctttttccctttcttcttctaatttcaattttctctctaatctttcagcaaaactcaaaggtttacttgattttccaacttccttcttattcttcttattcttcttcttgtcatcctcttttttcttcttttgagctgctcttcttgcctcctcttctttcttcttttgaactggtcttcttgcctcctcttgcttcaatttagcttgtcttgcttcttccacatcaatagctgtttgtcttaaatgttcctcccaacctaatctctgattttcaatacgtgttttctcctcttcagcaatacgttttgcttcttctttttgtttctttaatttacgtgattttctaacattttctaattttgctgcttcatcattagttgaattaattggaatattctccttatcagaaactactttagttttagccttctctttttcttctgccagcttcaacttagtagcaactcttgtagtaaaactactcgtcatctcttgtattgaactcatggtcaatggccactactttaatttaaatgagccgtcgttgcagtatataagaaaagcatcaccaaaatttccattttagattttttttttaacacacgaaagttttagttttttttactgattatatacttaacgttacttatatatactcttttgcaaaatatagtaaaaccgtggaccaatcaaatatctatacagaactaaattttattaaagatccaacatatcattagattttattagaattaaattcaaattccctaccaccttcaaaagatcataccccatttactaaagatgatcgtattattttaacagctttttaaacacatgtattattctcagaagcctactacacagcgtacaatcaattgggtgtattatgtttcacagttataatcttataaacatctataaaaattcagtttattcttgatttttcaaaacatagtgtaccaagttccatgataatatcatctcctttttcattacattccttcaactcattcagttctttctttttctcttcttcctctctgatctttttagcttctgctgtttcatcaaatggtatagagaattctctgaataatgcattcttctctattattaattttttttctttttccttgaattcatgtactatttcaagagcttctgaaaatttgtcagcatatcgttttccagttgttttatcaatagcaaatatatcgtactttggcttttcatttgctggttcttcttcctttgattcaaccttctttggttcttgctttggtggtttttgttcttgtttaatatttgatggtttaacttcttttttcttattacttgtgtttgctgcactggacttttttgaactctcagctgcctttagattcatttcatcttctattttcttttgctccttgtaatattgtgttcctcttgcttttaagtattggaagttttcatcacccacttcaatttctagactaggaaaacaaagtacttgattaaaagcaaacatttctccaaagcattgaagttccatttcctctctttcttttaaaaattttgttctttcaatttcatcttccttggcaaatttagcttctctaatttgttttgcttttgcagtttcatttttaggaatgagacgttgtctctgtaatgatctttgattagctgcttcaatttcatctttcattctttcatgatataaatcatgataggcctcaaataaatctctttgaagtgtttcttctgtatatttcgcagtttttggcatagttaatttacctttcctttgattagcattagatccagattttttagcttccctttcttctttgtctttactggcaaataatgcattaagatgctttttgaattctggatcatcttctcttgaatatggttttggttgagcttctctgactttcttctccatcattgctattttctcattcttttctcgtgcattcttattatcaattatcttttgttcattagtctttgttgttgaggtaccagcagtattagtggacttactagcattttgagcttgcttttgttctgctaattttagtttttgttcaagtcgtctagcaaacccatcagctggatcaggttctgattttttaattgcatctgcttttgttctaattttagattcagactttacagatgtttttgctgattgagaaacaggtttagctttctccttttgttcttccatttctaattttttagctaatctactagcaaaactatcaacaattttctttgatgtattaagttctttttctttctttgcctttaatttcatttccttttcatcagatttcatggtccttgcttcaaattgtctagataacatgaaagagttttcaaattgtttcgttctttcttcatcaatcttcgcatttggatctttaccatgaatcatattggccatttgagatgatgatatcccatttggctttttatttccctttgatttactgttactcatgctcagttgatcagctttagaagaagatccaataaagaaatatacaatgagccaatgatccattaattggcaaagattgtgacacgaaaaattcatgaaaaaaaattgaatgtcgccaaaaattttgaaattcatttacttcataataacaatttatttaattctatttctatataaatggtttaaaatgaacagttataaatacgtgtattactataattaataatcatcatcagtgaattctattttagattgatgttgttctaaaatagattctcccaatgccatttgttcttcaaatgccttagatttgaattcctcatcttccttttcatcagccaatctttccttttcttctctaattttcttagcttcaacagtttcaccactatgatcctctaaacttctcatatattttcttctatcttttctaatatcatcttgttgtttctgaattttctttaatctaacaataccttcatgagttccacctatgatttgcattttaatttcattatctcttgcatttaactcatttaatttactaaaaatgatttcatcaatttcatcacctgttttcttaccatcatatttctttataattctatctgaaattatgtccattcttttttctatactggcgacagttttattttttgcttgagttctcttgtctggtgttgtttccttttcaggtgttttttccttttcagatgttttttccttttcaggggttttttcctttccaagagctttttgttctactagagctttctgcttttcaagctctctgattttattttcaatttctttttgcttttctaatgctttttgcttttcaagttctctttgtctttcaagttctttttgtctctcaatttccttttgcttctctaactctctttgcctttccagttctttaatctgttcctcaaattccttttgtttttctaaagctttttgtctttccaattcttgttgctttttaagagctttttgcttcttacgttcttttttcctttcaattgcttgttctctatgaatttctataagtttttcaagttcatcaaaacgatgtttgtttttttcaaaaacatattttttaattttctctaactgttcacttctttcctttgccaatttttgattatctaattcatcctccttagcatatcttgctaatcttttattcttttcttgttcagtttcagaaattgaagcttcaagttctcttgtgaaagatttttcactctccattgtggcttttttattttccataattttatctaatttcatacacgcttcatccatatcaagtgccatatcaattttaatatcttgttcagtatcccagataatcatttctcttttcaaaaatgaaattttctcagatttaccaaactttggaaaatcttcaatttcatttttaagatctttactttttttcttttgaaaattttcataatgttcaagtaattcatcttcgttattaagatcaattgttttatcagatggttgaccaaattttttaatatatttaagagcatattgtgttttaaatcttttttcaatatcaatatcaacctcttctccttcatcttcttcttcatcggtgtcatcaaaatatccatcatcatcttcaacttcgataatttcattaaaatattgctttcctgtatttgaagttgttggttctggttcctcaacagtcttaacagttgcagtactacttgttccttgttttgctttttcctgttcttcttctaatttcaatttcctctctaatctttcagcaaaacttaaacctttagatttagtactttccttcttcttcttttcttcctcttctttcttcttttgagctgctaattttgcctcttgttcagtttttcttcttatctcttctacccctttagctaatctagcttttcttgcttcttcctctgcacgtttatctttaattggaatattctccttttcattggtttgagacttctttctttcttctactgatttcaacttattagtaagtcttgtagtaaaactacgtgtcatctcctgtattgaactcatggtcaatggccactactttaattaaaatgagccgtcgttgcagtcagtagcaaaatgtccatttcatatttttttttcaacacacgaaagttttagcttaaagttacttacatgattacataagactatctactacatcttctcttcctttgcacgtctctctttattaatctgtatagttctttccttatcagatttaccaccattactaacagataatttattaaatcctaaaccattatcaatttcaccatcttcatcttcatcttcttcattattataattataactgtaattatttgatgatttaattgtcatttttaacatatttttaatatctcttgatttatttaaccaattacttaattctgatccaagtataaattttaatacttgtatacgaatatatgaaaaccatgaacttacctttaaattctttgattttgatattttaattgaatctaattcatcatcatcatcggatgaattattcattgtatttgatacttgtttgaaaatatttttagcatccttacctttcttaccaatttttttactaccttcattagataatgtttgtatttcacctttaattaattcaaattgttcattaataaattcatattcttcatcagtggtatcttcctctgattcctgttcttttttaatttttttattaaattcaattatatcataacataatccaacaattacacttgcaaccattttagtttcaattttatgttttttattaacaagtaccaatttaatagtttctaaaatttgatcttcaattaattcatcaacatttctaccactttcccaagctaatgataatgaaattccaaccataaataatgaacttttaattatattatcatcaataattaaatcatttgaaatataatttagaaatattttagtatattcaattataccataattttcagaattaaaataaataaataaaatacatgacattaatgaccaaattgataaatcaattttcttatattcaattatactaactggttccccttccaatgaatctaatttacttataattttaaataataatggtaaaacatattcaataacttcacttgaaacttcttcattacccatacaactatatgatataatacatcttaaccaaatttcccattcaaatgaaagtataccatcagaactttcctcaccaccactacttttaaaactattaattaaacttaataaatcaatttcatttggtccattaataccaaaataaatttcattatttgaactaattgtcattctatataaatgtgataataaaatttctctctcaatttgtccaatacccaaacgagttgataatctactcgatgatgttaaagttttaattatttcatcgatatcatataatttattataatttgatgaattatttctatcactttcattatcacttgaatcaattggatcaataagatttgataataaactattttgtcttgattctgtctttgataatattgattttaatgaattattacgttgttcaataaattcattattttcattatttaaataattatttaatctttgattaaatattaaattaaaatcatcattagtattacctgttttctcagtactgatactacccttgtatatatccctacgtaaatttgacatttgtccttaagaagaaggacatgtagttaggtattaataataaattatcgcactatataaaattacgtaaagctatttatttatttaatatcatgagtttccaatggacttatactttcaatacctgaacttgttacatttgtatttgtatgattatcatcgatatttaataacaaattcatatcattatctttattatttaacattgttaataattcattaatatatttacaaccaagttcaacagttgttgccttacttggtacagttataccaattttcatcttttcaggtattaatttatctaattcttgaattgcaatattcattctatttcgacgtccctgttctgctaatttatgtgacatttttttatcaattgtttcattatttgatggggttggtattggtggaattataggtcgatttgatgataagatacttgtaccaacaggtggcattgaaattgattttttattagaattagaattaaagttggatgatgatgatgattgtatacttggtggtaatgaaggattagaatatttaaaaattggtgttgatgttgtacttgattttttaactgttgaatttgaatttgatgatgaaattgatgatgttgtactttcaggtattttaaattcaaatttattattattaatatttttctgtgattcaatcaataaatttgagcttgatgatggtaatataactggtgatgattgagaatttttattatgattggggttaattaaaacactattttttttattatataaaatatttgattgtgaattattatctgaattatttaatgaaaatgattttgatttttgataaattggtgattgttttgtaataaaatcattattactattaggtggaggtggtaatgttaaatcactatcaaaagcatcaacaaaggaattatcactaaattcattattcgaaaaagttttaaaagaattagtagaaatagaactttcctttgattgtgattgtgattgtgattgttgattagagtatgtatttgaagttgttttgaagatataagtttggaatggactattagttgcagtattattattattattattattattattattattattattattattattattattattattattattattatttttagaaatagatttccttgaatctaatgttgataataaaggagttgaaattggagttttagaacgtttatttgaatttaaattctcatcattatcatttgaattatttgctgtgttgtcgttagtactattactattacttttattattattatgattatcattaatatcctttcttttctgtcttaaagttgaaaaattattatatttactatgactatgactatgattttgattttgattttgattttgattttgattttggaattctaaaacaggtgaagaaagaggggaaaaacctgatttacccttatttgaactaactctctccaatgaaggattaatcattggagataataaaggtgtaaaatcattattaagattagttgtagtatagggatcatttgtaggttgagtatgttgtaacataaaatccaaattttcagctgtcattaaagaatcaaaatgaaatttattattatcaatattgttatctgtatgattattattatgaatattttcattattattacttataccaatatctaaattacttgaattaaattccgatatattatgtaaatcagaccatttaaaatcatgtgaattatccatcatttcagtgatagttactggaaagaaagaaagaaagaaagaaatgaagataataattgtatactgttagtaatgatataataataatttattataagagtcaaatgtcaaaagattaaaaattattatctttccaatttggggaagtcaagcgacagatatagcacacgtggggggtttcccttttaggaagtatcaaggagatctaagatttatcttattgtatggtatggtatggtattagataatacagcatatatacggcagtattattcttcatattgtatataccgatatagtagtaagacatacatacatacatacaatacataaaggaaagaaagaaagagagaaagaaagaaagaaagatacaacaatataaactgaaggggatatacgtcattatattaaagattgatggctcatctatttttttctttctttctttcttttccttttttgctattgctttcttttgtttttagtatgcagttattataagtatgtactgtagtatagatataaatgattcgatccagtgtgatatattataatatcttaacacacaatacactaccgtataataataataatccattaatacaccctgaataatactcagctgagccatgaaaaacaaaaaaaaattaaaaaattaaaaaaattcgcgaacttctcaccatttcctatttggtatttcgtatactacatgcatgaatttccaatgtttacaatctgcttttatagacaatgaacttattattattatgtcaatagaatacatttatattatatcttcttatataggttcattcttattcttattgggaatatacatatcctgcttttttccatcatttgtttcataaaattatagggaaaaaaataattattcatgatcttgaatcattcccatattctcaaaagaaagcatatcctgagaataaactaataataactgatgatttaagttattatgctaatttattagatttaaaattagatacttttgaaattataacagaggatgggttttatataacattaaatcatttatataaatctacaggagaagatactaaggataaataccctattttattattacatggattaatgcaatcatctgcatcatttttaacttcaggtactaaaagtattgcatatcatttaattatgaataattatgatgtttggcttggtaataatagatgtggatttaatccaaaacatgtgaaatataattcaaataattatcaaatgtggaattgggatttaattgatatgagtaaatatgatttaccttcattaattgattatgtgatgttaaataataattataaaacattatcaattatgtcacattctcaaagtacttcacaatgtgttttattatttgcaaatgattttagggataataataataatgataaatataataaaattattgataaatgtgttttatttgcacctgcaatttatggtggttcattattaaatgaaaaattatttattaaatttattagattgatacctgattggttatataaattatttttcggaattaattcatttatgccaattttagttcaattaagaaatttaacttataaattaaaaggatttggattttcatcttatattgtattcaattatttatttgattgggatgatcaattatgggatgatgaaatacgtacaattcatttccttttcagtccggtttatgtttcaaataaattaatgaaatggtggctaagagataaaaatggttttggtaatggtaaatcaattattaatagagatggatattggtttaatgaaaattgccctaaattactgttgattattggaggtaatgataaattagttaatggtgatttatttataaatagattaaaatataatgaaccaaatatgttagataattggcaatttattaaaataaatgaatattcacatttagatgtactttgggctgataatataattgataaaattggtgataaattgttaaattttttaaaatcatagaaaataaatatatatgtaatatgtaatatgtataaatatatagagatagaataatattaaactatagtataaaactaagcagaattctttttagctaaatcataagctttttcacttgggaaatgaggatgaattggtttaaatatttgattaccatctttaaaaatttctctaccaccatcacctgggattgatttagctaaattaagtgatttaaatacacaatcatttaataaactttcagcttttctacaatttttaaattccatatttgaataattaagacatttataatgcatttcaaattctttcttacaatgagcatttaaatctgctaaaacacttgatgcacatcttgtaactttacgaccttccttaaggcaattgactgtaccatttgaaccattttccttttgacaaagcataaaatcatcattgaaatctttacatctatcttgaatgaaaaatgatgcacttaataatggacctgtagttgcaccaatttctttaacatgtggaatttcttctggtaatttatcattttcaaaaacatattgagtatctctcttcttatcagtgaagttagaagttgagatgttatcgtatgtattagatgtggacattgttctgtgttgaaagaatatataggtgatttcttagtggtttataaactaattccccactcttaggggaagtttaagaatttcatgaaattttaaagagcgggtaattatctggctcattaggatattttatatcacttctcttttccctggtttgccactgttcgtttctcttgaaaccatgctggaattcacagcaattggcactaatggatctcaggggagacttttacaactatatgatccaatatccgttgatgaatccaatttacatgtaaatatcttagctgatccaggttggaatggaattgataatattgatgaaatttatacacaatcattaattgattcaattgatttaattatactttcacaggcaactattgaatatattggcgcctatgctttgcttttgaataaatatcctcaattatgtgatataccaacttatgctacattaccattatgtaaattatcaacaatttcaatattagaaatgtatagatcaattggtttattaggtcccatagattcaaatttaattgaaattgggaaaattattagtatattctctcaaataaagactcttaattattcacaattaatcaaattatcaaatattaataataaacaaattaatttatcattaactgcttataattcaggttattcaattggtggttcaatttggttaattgaaattaataatgaaaaaattatttatgcaccaatttggaatcatgcaaaggataattttttaaataattgtccattatttaataattctgattttattagaccaactacattaattacaaatagtgaatttattaattcaaaattatcacatcaattaaaaattgataaattaattgatttaattgataaaattttaatttcaggtacaaatgttgttttaccaacttcaatttcaggtagatttttcgaattaattatacctttgttaacaaatttgaagaatgattcatttatttatattattaattatacaggtttagataatatgaaatatttatcaaattttcttgaatggatgaatcctaacataataaaattatgggaaaataacaatagcaataataatagtaataataataataataataataataataccaataccaacaacccttcttcaacgatatcaacattagcaagtaatagaattaaagttataaaattaaatgaattaaataatttaatacatacaggaaatagacctaaaatttttatagttgatgaaatgaatatgattgatgattcagtttttaatcaattaattaatacagtcaatgcaacattaaattattcaataatattaactgaaccaccaaataaattttctaaattaaatgattttataaagtttggaaagaaaatacacaatcagaaatagataatgaaggttcattaattgtacttaaattatctaattatgaatctaatatatttgaagaaactccattaagatcaaaagaattatctaattatgaaaatatgataaatgagagaagatcgttggaaattagattagagaaggaaaaattggagaagaaaaaaattgaagatttattagatgctgatgttaaagaaatatctgatgatgatgaagaggatgaggaggaaaatgagaaagagggtgaaccagatgataataatagtaatagtataattagaaaaaatcttgaaataacgaccaatattattaaggaagccgaagctaaatatcaatttgatgaatcaaagatattgaaaattgataaaatattaacattaccaagagattttaatgtatcaaatcttaaacataaaaatagagttttccccacagttattaataaatttaattttgatgattatggtattttaattgatagtaaagatttccaaatttttgataatgataaattcccaataattggagaatttaatgaaaataatttaaatgaatctgaatcatcagatattgaaattattgatgagaatgataataatagaaaaagatcacgtaggagaaatggtagggataataaacgtaggaagaataatattgaaaatatattagataataaaataactacaaataatttattagattcacttaataatccagtttctagaacatatacaaaaaataaaataaatattacatgtggattttcatttattgatttaagtggtaatcatgatttaagatcattaaaatttacaattaagaaaattaaaccaaagaaaattattatattacctgaaataaggaatggtgattcaaagtaaattaattaatgaattgaaaagtgataatgatataaataataataatgaaattattaaatgtaaattaaatgaaatgataaatttaggtaatattataacatcatttgatttattacttgataataaattaataaataaattaaaatggaagaatttaaataatgaatatatgataactccaataaatggtatacttgaaaaatctaataaatgggaatacaaattaaaatctaatgaaaatgagacaattaatacatcatcacagaatattaaaattggtgatattaaacttaatcaattaaagattaatttacaaaatgataatcataatgttgaatttttaggtgatggtagattactcattgatgaaaaagttatagttgctaagggtaatgaaggtaagttatctattgaatcaaatcttgatccattattttacaaagtgaagtcttctattgagaacatgcttgccaatatttaaaaaattttaaaattaaaatgtacaatatactttataaacataattagaaaaaccatctataaattaataacaatacaaccaatgcaacaactgctaatggagtatattgtttaataaacaaatcccaattaatcttctttgcatatttcttatatttaaaactttgttcctttaatgaatttgataaatcttgtaaattatttaaattttcacctctatttaataaatcatttatatttttattcattatatttttaacatcatttaattgattattaatatcatttaatccatcctttgctcttgaatctgagtaaattttcttacttttactaataaaagtttcaaatgacataaattgataaggtctaataatttcacctctttccctaaaactagtaatttcatttttataaatatgattaaattcatcttcaatttcacttaaataacttaatgcaagttgatttgggaatttatcatttgttataacaattattaataaatcattttctctatttaatttataatgaatacaatatggtttactttcaatattaccaatatcaggttcattagggattaggaaattttcaaaataattggttttatcttctttttaagttcgattaattgagattctttaatatcatcagatgatgcagcaagtggtgtcgttgtagacagttggatatatcgttgttgattccattgatctatgttgaataaaaaaggaaaggtgtgtttatttatatctatggtggtgtttatttaagcaacatgaaaatttaaatgttgaggaatttataaagtatattcttactactttaaattactaaatataatatattttacataaaattatctaattactgtgttaatttcattaactttgcttcatcctctgccattaattcacaaagaaattgtataccatgttgttgtttagctaagattttcaataatcttttaataacatcatcagaatcattttcattattttctttattatcattaatatcaatttcatttaatgatttatttaatgatgcactattatcaggatacttatcctttaaatttgtaagacgtgcccataattcattaactctacttaaaccaattggatcatctaattttgataataaatttttaaattttaaaattaaaatttcttcatcatttgttaatggataacctttaaattttaaaattgataaattaattgcaattttcaataatttaatatttaaatttctttgtctcattttacattttaataattgagaatttgaatgtaaatcatgtttttcatttaatttaattaatttatcattaatttcatttaataataatcttgtttgtttaacatgattatcttgtaattgatttctttcaaataaacctgtaaatccaatacatttaattggaattgaattatattcctttggtctatttttcattgcattttcccattcctctggagtttcatttaatggtcttgtaaaattattaaatgaattatcaactttattatataaatgtgtaaccattgtagattttggattattaccatcccatgatgatttaattttaattaatttatcattaattgttggtgtataatcattttgagtatgttgttttgattgattattggatgttgttgattgtaatggttgtattggttgtattggtgcctgttgttgttgaggttgagttgtttgtccaaatgtagtggtattggatgtattatttgttgaccaagggaatgaaggttgtgaactgaagttttgttgtaggggttgggcttgttgtgattgtggttgttgttgattttgttgtccaaataatccattagttgaaggttgtgtatttgaagatgttccaaaagagagacctgtagtagtagtagcagcagatgtagttgcgggttttgaaccaaatgaaaatccaccaccggtagttgaagcagcaggagcagaaggtgttgaagatgaagtatttaatgaaaatccattagttgcaggtgtagttgttgatgttgatgatgaattaccaaacccgaatgatggtgttgtatttgttgttggattagttgttgcaggtttattaccgaaaccgaaagaaggagtggaagtagtagttggttttgcaccaaatgaaaatcccgtagattgttgtgtctgtggttgttgttgttgtccaaacatagcacagatggttattatatcactacttcccaaaagaagaaacctacaagaaatcaaataaattcatgttaatgttttaaaatggaaatttgttgaaacattaacatgttacgtaaggtttttcatattataaatttacctatattatatagcttatatagctttatttacttatatacaaccacctcttaatgataaaacaagatgtaaatcactaccttcaattacaccacattcagcaagtgttttatcatcatctaattgtctacctgcaaataggaatctttgttgttgtggtggtataccttctttaacttcaacaatttcctttaattcactaacttgttgtgttaattcaatattaactgggattgtacgtccagttaaactacgtatatttatttgaaccattgtaatactactgtactctattatactatactccttgcctctaataagaagaagaaagaaggtattatatagtgggattatagaacgcgatctttaataatttgattacatgaatatttccattagagaattacccgtttaggaaactttgtttcttttttcttttccaactcttagacaatgttatcaacacctatagtgaaagatttagatatagataaagtatatgaacctgcagaggatactttcctatttctcgatatgtttgaacaacttcacgaggaacagtatttcacctaatttaaattcagattctactgcaaattttgtacttgaaataggttcaggttcaggtttaattacaactttcattgctcaacataatatcatcccccgctcttataatttagtatcagatataaacattgtcgctttgcgaactactcttaatacattcaatgacaataccaaaaatactaattgtgatgcattaagatgtaatttagctgattcaatacgatcaaatcaaattaattatttattatttaatccaccctatgtcccatctgaggaaataccttcaatacctgatgccgatgatatttcaaatactgcttgggtagatttagcccttgttggtggtaatgatggaatgttaattacaaataatttattaaattcattaaataatatacttgctataaatggtgaagcttatatacttttctgtgcaaggaataaacatcctcaagttgttgaaaatttcaaatcaaaatggaataatttccaagttaattgtgttattcaacgtaaatgtggttgggaagaattagcaatttatagatttaaaaaaatgtcttgaaaaataaagtaaagtacacattatatattattaaataaatcaaagaaaatatcatcctgtaatacattcataatcaacttcctttaatctatattcattctcatatttcttaatctttaatgttttaaagaatatcattaattcactaatatcatcaattttattaatatttttcaataatggtactttcttaccatattcattaatatcatcaattattgaatatccctttaaatctaattttaatttacttattttttcaacaattccaacttcattaccttcaggtataatttcatgaattccatctaaattatcactaataaatatccattcatttaattgaaattcttcttcatttaaaataattaaaatatctaataatttacatccctgtaagaaaattatattgaaaatattatcattattatttccatcatcaattccttcattattctcaattttttcaaatgtttctgtaaataaataataaattgatttattaatcattatccatgtatcagttaaatgattctcactaaattttaaattaacaactcttaataaaacaaatatccaaccttcaagtaaacaatatttagtcatttgtctaaatgcaaagaaaaattcattaattttatcaattaataaactaataatactaacaaatttatccttttcattaattaataataaataaataattctcttaatatgtggaatattactatttaaaatatcaacttcatcattccaattaaataataatgtacttgatgtattagtactattagataaaattaatttatttgttataatatcatttaatttattatcatcatttaaaatccatcttttcataatatcattccattgctttaattgataactatctaatttcattttgaaaaattcattatcttggaataatttcattacaaaaatttttccaaacttttaattcattacaatttaaattctcacttaatttaattaaaagttccataatatattgtggaattgtatcaaaattaattaaattacccttattaataactccactaattccattaataatactactaaagcaattgttcaatttatcaatatcattgattaattcatgcatatgtggtataacttcaattaatgcatcacaaacttcctctctgaaaataattttattcttaggtactttcattaacaatttcctttgaaccatcctctaacggtgatgaattctttaaaataacattagaaagagtattttgattagatccaactttggtagtaatacataaattcaacatcttaataaaattttcacttatctccttaacaactctcttttgtctaccatatgatgtttgttgtaatttataacttgttaaacataaaaattttaataaatttggataaatatatttataatatgaaatatttgtaaatgaatctttaataaaattttgtacatcatttggccaaattttctctaaattttcagattcattcaaatttgcacaatattcaactaaaaatttacttaaaatattttcatctaatcttgaaattaataatgatcttttattttcatctaatgatgaataattaactcttgaaattatactatccaaaatataacccaatataatattctgtttactatcatctaaaactttaaataatttaaatccataactattttcattagaattataacattcaattaatgcttcaattgtttctaatggttcaatatcataattttgttcaattaatttctttgatctaaatttgattttattaaaattgtacattgaagttttattagattcaatacttaaatgatgatttccatttccttgtttaaaatcacaattaatccaaatatcataaactgtaaaaatacttcttctaaatgcttcaattaatttccttttacgtttagtaccttcatttttatcatctgtattttctacttgaaaaactccttgaataacagatccgaaaaatccagtttctttactattattattattattatttgaattcccaatattattggttccattaccaattttatgattactttgatttaaatttgaaatattaccaaatccaaatttatctgataaaacaaatcctaaatgtttatgacattttaataaaaaaatttcaattcctgaaattaattcacatattgaatcactaactaaattaattttttctgaatttccttgaattattgataaataatctttctctaatttactacacatacaatcaactaattccatgcatatattacagattaaatcaggataatattctgcagcacagaggataagttcaatccaattatcaaatgatgatgatgattgacaatttttaattccaattgtaataaaatctaataaattaattgattctttatcgccattattttcaaatactgaatatttactatgttgatttttacttgataatttaatcattttggtaattgtttcaagataatatgaatttattaaatgtttactaatatcttgattatttaaacaattttcttcacaattattaattaatgatgcgaaaattaaattgaaatttgattcacttccatcaattaataaattaattaatttaagtgataatctcatacattttaagaaatttccaaaaatttccttagaattaattaattcatttgttggttcaatttcctataattttcgttaaaacattaaccataaatgatttataagttgaaatatcccaatttctatttttaataaattcaatttgtttattattatcaataacacataattctaatttaaaattatttaaaatttcatcatttaattttaataattcatataaaatttcaagttcattagatattttaccaaaatctattaaattcatattatcaattttataattttcttgaatataatcattattgaaaatatttgcacaaataattctgaaaattctatttgatgtaccattagaaattaatgatttaatccatttattaattaataataaatgagtatcattattaatttcatttaatataatatataatggtttatgtaaaattgatattgattcatttgtatcattatttaaatgaatccataatatattaaattgataaattctttgttcaaaatcatcaatttctaataataaattacataatgcagcttcaatatatgatgaaccaattatagtctctaatttccaaattctttcaacaatttcaacttgatataaattatctgatgtttgtaaacaaatccaaagtaatttaattgtaatttttaataattttaaactctctaatttattaatatctttgattaaatatttgaaaagatatgaaataccgaaagatttatgaatatttgattccacgacattatcgtcaactttaactgttttttattttttctcttaacgttgatacattccatgaaattgaattagatgatattggaattattttaactaaattatcataaattttacaactttgaaaaaatatttcatcatttaaattaaaattatcattaattattgaataagtaaatcctaaatacattgcagataattcatttgcgtgaaatggtttagagttttcattatttgttgaatcaatattagtatcgattgaataatattccgatattttatcagatattgattttcttaattctttattataatgaatcaacatttaataaatttgaatctgccaattctaaaggtaataaagctctctgtggtataaatgaaattaaagttgttaataattgaatccatttagtattattttgaaataatgcaaatactgataataaaataattggtatatgagttatcaacatttcctcatcttcaacattataatattgtaaaataaataaaactaaatctaaatcattatctttaattaattttaaaatatttgaccaaataatatttgtatctattgcatcaaataattgatttgaacgtttaattacttgatcaaattgaagattatgatttatattgaaataatgagatactttcataattggtataaataattgaggaacaatactttgaccaatttcccatttatccattattgaagtaactatagtacaagtattgatataatttgataataattcatcatcatcattagttttgtcttcctctatagagatcaaatttaataatgaatcaactgtatatttataactataagttttaaaatattgtaatctagaaatatgattattttgatcatcattaccatcaattgaatcaggtcctaataaccaattccaaagtcttctatttaatgacatatcttttcttaaaactgtattaataacatttaaaaataataaatttttatcattatttgaaaataattgataaactgatgaatttaatggcattttagataataaaatatcgaaaaatcctctttgaacgaataaatttgaatcattcattgcactacataatgctctaattaataaacctggatctggtttaatacaagaaattgcatcattagataattgacttagtatagaatcttttaatatctcttcactatcgttaatctctatattaacaataaatgaaggtattttcttagttaaatattccattgcaccaattcttttatcaggagatgtaataataatcaacaatatacattgccaaaaatgattattatcattcaattgaattttcaaattatctattagttcctataattggttggaaaaattctgatgttgtatcatccaatgctgcaaataaacttaataaaattgatttaaagcaagatcttaaaaaaattggatttatttgacaaatataatttttatataaatcaattaaatcttgcttaatactaatacttgcatatgacattaatggtaaaatccctggtaaccaaattgtaattgatttacctaaattatcaaattgtaaaatattgaaaattgtacaatataattcaattgctttcttatgaacaccacttggtaatgaaggtaaaatacattttgataaagtaattgaaacttggaaatcataaggaatccaattgattgtattaatatcaggatttgttaataaagatttctgtaatttaactaaaaatgcaatataatctgcccattcattaactgaatcaaaattagttaaagctttttcaacatttgacatgtatttcttctccttgggagataatgaagtactttgacctagtgcagatgtctttgaattgaaggatttggatccctgaaatagagatattggacccatcattctatgcatgttgtctgtctaaaagaagaagagccttcacattaaaggtaaaaagtgcgattaatatgtttactttgtatacaccttttatatacacctttcttcctttgggtatgaagacataccgtgtactgtggtatccttttgaggtaattaattgaccccccgtagtagttgtattaagacatactaacatataattatattaaataacatagggtgttttattctttatatcaaggaaacaatgttggagatatttctttattcatatgagaccattgatagtagtatctttactggtttatctgataattatacccataactataactatattcttacttagtggtggtacaatattcaccgtaataccatcaattatacagagttgtaattttatcattaatttcattaataagaatataattttaccacgtatattaaagaagttatttgattttgtcattcatgaacatatgacaattaagtataataaattacccaagggtgtacttaacccttatttaccaggttattatggtgaaactcttttcggtagatgtttccgtacatttacaagaatgtttggtccattgatttggattagtaggttaattatttgctttttaattaatatgataccaataattggaccaatattagttatattaattaaatcaccaaaatccgggtttagtaaacataaaagatatttccatttaaagggttatacaaatgcacaaatttattatatttggaatcatgaaaagttacaatattgtcaatttggatttatttcattattattagagaatatacccatattaggttatttatttatatttaccaatacagttggtgcagcatattgggcaacagatattgaaattgaatttaataaagatatgattaataaaatgaaagtaaagtaagtcatccttgattaaatatgtttacttaagaattcaacaatatctgaaatttcttcattacatgttgaatgacccataccatgatattcctttaatttataattattaaatcccaacctttaaaataagtagcagcatctctagccatattaatattaatcattggatctaaatctccatgaccatggaaaatatcagtatctttattaatatcaacaattctctctttaatacctttcttcatattgaaaaatcctgataaacataaaataccacctaatttcttctcatatgtagaagcaatacctaaacttaatgatgcaccttgagagaatcctccaacaattatctttgatggttcaatgccattattaatttcatcatcaattaaattcttaattttattaattgaattccaataaccatcttcatcttgacgtgcatttgggttacccatttcaaaaatatcgaaccattgactaactaatccaccattagcaattgttaatggtttaattggtgcattggggaaaataaaattagttgattggaaagtttcatgttgatgtaacatatcacttaaaaatttccaaccttcacttgaatcacctaatccatgcattataataattgatgaagttgcagtctttggtgcattgactctaagtgcattaagtgccattgtatctgtgtctgtttctgttggtctttccttggatttgaaaacccagataagaaaagctaaacatattaagactacatgaatgtatcgtaacagcgaagacattagtattaatactagttacttgataatagattataatagattaagaatagattaagaatagattagtaatgtccttgaagtgtacttatactacaagacagaatcagaatcacttgataataataattagtcatgattattaaccattattattaatatatatgtcagcaacacgagaacaatttttagttatattaatattaatactaatacaggcctttctttgacaaatgcaaccaatactgccaccaaaaccatctattccatcacaatcaaccatattaacacccacagatgacacgataatcgatgaaacactccttaatatatttaaatcaaaacataatggtacaatacctcaaataccattacctgatttccttcaatgggtatccaattctaaaataaaggaatttttaaaagataaagaattacagaaaggttatttagaaatcctatatgaagaagaatttaaaacaatcaatgcaaaacgacttgaacttgttgaattggaaagaaaaagattgatggggttattaaatgatataaatggaaacattaataatgttaatgaattaattgataaatttaatgaatataataaacgtgtaggtgaattaaatgattatcaattagatgtatttactaaattaaatgaattatctaaaccttcattgataaataaattcaatgaacaattactgttgattgaagatcaatgtacagaattacttaatgataagataaatagtaatgggaaacttagtgatgatgaattggtggaatttatcgaaacttatacaaaactacgtgaaaaatggcatataataaaggaaattattgttcaattaaataatggattagttgatggtatagtatagtatagtatagtatagtattaaaataaataaaaggtaaataaaaagtaaatacgataaataaactacttatgacttttcaagtaaataattacttgcatcttcaatactccaattctttaaacgtaatgcaagtattgattcctcctctgtgaatcccatatctgttaattcttcaattgccaattcctgtgaattacttaattcattattatcattatgtacttccggtactgattttggtgttgtttcctcttcttcctctttagcaggttgaagatttggatcattaccaaatcctgcaaatacttgttcccaatcatcaccttcagttgttggtgtatcattacttggattattttcaataaatgaaaatccatgattgttactaatattattattattattattatcactaattggttcattgtcttgttcaattgttgcatcctctaattcagaatctaaatctaaatcatcaaacattgatggtccagtttctttatgttgtggaatttcattgatattttcttcatgagatttactaccaaatggatttttagatgttgatggaattggtgatggagttggtgaatcggatataggtggtactgcatctttaaattcttcctcatcttcctcctcttcacttgatgaatcattcaatggttcaagttctttaatttgtgggaattcatcagtttgttcaatcgttgatttatttggtgtatctgataatgtttcaacttcagaaattggttgtgatgattgacgttgttgttcaaagttaagattggtacttgtacttggatgattaacaaattcaaatgattcattattattctctgtatttaatggtgtaggttctacttctttttcctcttcatttccttccttctcttctgaagcttcagctaaatcttcatcatcaaaatcatctaatgaagaagttggaatttctccatcaacaatatgttcctcctcctcatcttccacttcatcacctaatataccttttgatgcagcatttgataataaatgactataattaacagttttatctgcatgattaattgataaatctgtttgtaattcatgtaaattcatttgttcatcatttaattgattcaatttatttaataaattttcatgtttattatcaatttggaaaatattattattaatttcttcaatttttaattttaattcattattggtattttcttgtgttaaaacttgttgttcaataattgctaaataattctttgatttaattaatttatcatttaattcattaatttcattatcaatttctaatttttcattattaaaaatatttaatttttccttaaaattagtattttttaattgaatttcatttaattctttattaagtgaatctttctttgtttgttctgcccttaaatttgtttcaattatatttaaatttttcaaaagttcatcattttgttcattttctttaataattaaattttcaatttcaattacttgttttgattcattttcatataattttttcatttgattaagtttatttaatatatcatctcttgctttaaaaattttatttaaatcattttgtgatttatcctttttattacttaaaattgatgtttgttttgataatgaattcatttgatttgaataatttgcaatatcaatacttgcctgtgcagtatcattattatttgatctaattgcaccaccaattgcactaccaatggtactaccaattgcacctgcagctaatccacttgctgcaccaattgctcctgcacttaatgaactaacaccacttgttacaccacttgttacaccactaacaggttgattagtaaacatacttgattcaattggattaacatttttaattacatcataattattattaccagtaaaatttggtttaacatctctacctggaataattggtacattattattagtattattaacattacctctaattttaggtaaatctaaattttctggaccttcatcatcatcggatgatgaatcatcttcttcagtggtttgtaattctctaccaaaattagaatttggtgtaaatccaggtgttgtaactggtggtaatggagatggggcaacttgatcagctgatttgaaaatacctaataaatcatccatatgagaaggagttctttgaggagctgcttgatctttaacagtattaaaagatttttgttgagttgatggaattgtaggtttagtaacattattattattataattattattatcatcatcaaatgaactacttttaattaattcaattggagtttctaatggtaattcataaccagctaatttcttttgaacaagatacattgcaattgaaaattcttgaattgtgaaaaaatcattatcattaatatttgataattcccaaatatttgctaaaattgaatttgataaatttgaagtaattaaaaaatttgcaacagttttacttgaaattaaattttcattattaatatctaaagttttaaaaattgaaccatattgttgcttttgttgatttgacatgatccaagtattaagattagtagatgaagttgtatctaaatttgaattttttgatggtgatggtaatggtgatggtgatgaaggtaaaggatttaatgattcaacattttgagcaactttccataattcaggtgataatttatttggtaaattattaattgaattattaataaaacattgaattaaatgcattgcaattataaattgtgatttatttaaattaccaatttgattttgatcaactaaattccaaattttttccaatatattaattggtaattttgccttaaggaaaatattttttgcatcattaccatttaaaataccattaattgcagttttatcaaacatttgaccaaatttagttgcttgagtaggggttaaaactggaataatttcaattgaagtagtagtagtaggaggaggaggaggaggtactatattattaaattttgccaaaggttgtaattttttagaattttcaattgaaatatctaaaccaccattctgtacataagatattaatctcatcaagagacaaaattgaaattgattaagataacctaaatttgaataatcaactatattccaaatttcacctaatttaatcaatgataaatttgatgattctaataaaggtttaatatttaaacctgaaattaaaccatttttctctaaatcaaaggatttaaaaattgaaccataaaatttcttttcttcaagtgttaatggatcaataagtgtatctgattctgacattgtgtttgtagaaataagtatttaaaaggaagattaaagtggcaaagcaattataattaaatgagcgaatcaactgcttacatgaattttttccattattgattattattattattattgattattattattattatcaagtgttttcttttaggaatggcagggatactgtaatgtttttgtcatgggaacttgtctgtttataagattctttcttaaagttaattagttgagatgaaaagggtttgatggaataatgatttgcaatttgaaaactttgtaagatactactaatagttttttatcagattccatataaagccagggtaaagtttacaaagttggttgatgcaattgcatatgtgagtgttggtcttacacaggtatttttcaggtatttgaattttttgatgtcttaggagagaatgctaaattaatgaaatctatccaagtttaagaatattcttgacttataaatatcaacgggggtagctctgggattcctcctcctaagctagaaagtattaataattacctggacgctaaatttgttgatgatttgttttcaacaattttagcgtgcatgtaattgttaatactttctagcttaggaatgatcaaattaggaattatatatatgcattcaaacttgattaatctttaagaagtcttgaaataaggtgaaaacccatttttttttttcaattttattttgatgatatcattggtttataaaacttattaaattattacaacaaaatgatttaatattatcacctatgaagggttaatgttgctagaatttcatttatttatttaacaattttatttcaaattgtaaattttaatgattacttgaggattttgttggtttacaatttttctatttcaaagaaaccatttacatttacataggtgtttcagatgaagatgcaagtggttttgatatttcaagttggtaaattaatgataaaactttttgatttaacatcagtttcttttattaaattgaattctttttgataatatttatgatccgtttgttatttacactgatcgtcaaggttaaattagtattttccaaaaaaaatttaatgttaaaagcaagaatattgaaatttctagaagttgaagtaacatgattgtactggagtaaatgattttgaaaagaacctaataggaccaaaatgctttgttatcattgtatcaaatttaagtattacaaccgaaaggataaaagatgaattacgaattaatgagaaaaaattattattagtttgaaagcatgtgatgaacttaacggtataattaaaagaattgatagataaattaccaattttatcaatttcaagtatttaaactcattagaaaggattagtttttttttgaaattaaataaatgaagaagtttatcatgatacataaattaactcattaaaaaaatatgagaatatacaatgagtggagagaaagttattaaaataaaactttttaaaataaaaattcaaacaacaagttttttttttattattaatttctacttggaaaattaaatacactaataaactattaaatgtcgatatattgataaactgtaaactaatgataagaaaattattgataatttaaaggcattaaagactatatagtatcaattttttacatcttttaataacaattctgctaatcttactattatagtacatattcaactacaaaattattaaatatactagaaaaaagggactatatactaacttattcaacatctaataaaattgaagaatttttcaacccacaatcttccaccgtcttatccaaacactccgataaatcaattttttgtaatctaagtgtaaattctttatcatttataacatcaccaaaggcatacttcacatgttggaaaatttccttaattgtagtagtatcacttactggtaaaataattcttttaccattacctgaacgtatttgaatacgtgttgttgggtggttgattataagttcttttggttgtatcttgtcatttatttctggttgttctacttcttctatttcttcaatatcagattcttcttcaggttcttcctccactgaatttaatgactcaacttcgttttcgtcattaaattctccaaactcctccaactctcttataaatttattaacatcaccatcaccattattaatcttaatattccattccattaatttttccccagttaatggatcaattattgccaaatgagggaattcccttacattatataaattacaataattttcaccacttggagaatcatgttgatattgtaagaaaatgaatttttcattaataattctctttaaatgggggtttttccaaaaatctctattaaggcattgacaattaaaatctgtgatgtcttgtatgttaattaaaattaatttattttccttattagcctttaatttagcattggggaaatcgatttgattaattaaatcccaaggaggtctaaaaatatttgcaagacgtttttgtgttgaagattcaggttcactatctgaatctaattcgattatattttgattaaaaattgatgattgtgtattaccaaacataccaccatgtcttacaggtggaacataagagaaatcatttgataatagagtatcatgaattggttcaattggttgtctaattgaagtatcattattatcattattatcattatataattcattttgtaaattatttgccatttgagtatcattttcaccaccgttttcaaaataaagtgaaattgctaaatcaatatcattatttgacatttctaagaatgatttagctgtattaatatcattacaggatgttatatccataaaattactatataattgatccattataaaaagaagggagtgtatataaagacattacgcactattaatttcctttattgtttcattaattgcattatttaagttatttatttcatataatgatattaagtcttctgataatgataatgtattatcaatatcatttaaacgtttattaatgtaggatataatttcatgtttattttcattaataatagtttgataacgattattaatttcttctatagacacctctttttggaaattattattatttaatttatactgtaatttattaaattcattatttaattcattttctaaatgattaaatgatttatcaaatacatttgggaatagtctaggtttgaaaccaagactctttttagatgtttttttaataaaagatttgtgtttttcagataatgattgtaattcattatctatcttagttatttgattatcaattgaattacatttacttataattgaagattttgttaatttttgatatttatccttaattaaggtatctaccgaaccattaaatgtagtatcctctatatgaccatcagacactatatcatttttaatacttaaaggtataaaaaattttttattaatatcaatatcaacaatattattaatatgattgtccattattaagtcgcttctttcagtaaacaagagatggattttatattattaatcaataaacagggtaaagttagattagtcaaatggtatagagaagggattgatggtgataagataattaaagaattaagtactttaatcccgatgagaaagaagaatatgagtaatatttacgaaatgggtggtatgaaagtaatttacaaaagatttgcatcattgtatttcattgtaggcataggtaaagacagtaatgaactcatagtcagtgatatgatacagagatacgtggaggtgatggacagagagtacggcaatgtgtgtgaactggacattgtgtttaactaccaattggcgtacaacatactcaacgagctgttcatcgggggcaaattctacgagccttcttataatattggtggtgcactgtagaagtgttttcattggctggtgggggttttatagtatttcactttttttatttgtattggtcgagtatagtatagtatagtatagtatagtatagtgaagtatagtatatcatatcttcttaaacaagcaatgttatctagatcaatcacctctattccaaaatactctactgctgctattagatgtatctctaccactccaaaggataaggcaaattcaattatcgattcattacctggtaattcaattatctccaaaactggtatccttgcaacttcagctgctgcctctctttatgcaatttcttctgaattatacgttgttaatgatgaaactatccttttagcaacttttatcggttttatgggtcttattggtaaagttgttgctccaatgtatggtgaatttgcaagggatagaactgctcatgttagtaaaattcttaatgatgcaagattaaatcatattaatgctattaaggatagaattaatcaagtttctaacctcaaggatattgtttcaactactaaaactttatttgaaatttccaaagaaacagctgctttagaggctgaatcatttgaattaaagcaaaaggttaatgttgcaaatgaagcaaaatcagtccttgactcatggattagatatgaagctcaagttagacaattagaacaacaacaattatcttcaaatgttattgcaaaaattcaaaatgatttgaaagatcctaaattacaagataaaattcttgctcaagcaattactgatgttgaaaagttattctctaaataagtatatcttttataactatttatttatttatttattatatttattatcaactatattactatatactccattatattcaattttataatatcttggtttatcctctgatggaatactaacttccccttctccaacattactcttaaatggtaccttatattcccttactttccatttaatattcccacctctaatactctctcccttaggattcatttcttcatcaaaatatccactatccttaaaataacttacttctttcttattcctctcatattctatcattatttgcaaatcaccttgtaatttctcaatttcccctaaatcactaacctcttctatctttttccttaaattactagaatccccccatctatataataatctttcaattttatcccttaaccaatcctctttactcatgaatataccaatagacttattggaacaattaagaccaagacttgctaatttaaataatactttgaaaaaacttgaaatttcaattattaatctcaatcattcaaacacaaatgacttaatttcaatacaaaatcaatttaatattgcattacatcaattatcaattatttctaattttataaatgaatcaaattcttcaattctttcaataactaatgtattcccaaataatcaatttaatccaaattcattaccttaccttcttaacctcttgagaaaaaaattaactcctgaagtagaagattggataagtatagaaaatgattcatcacctcccataacgtcaaatactaatgatgcaacaactaattcaatttcattagaaaatgatcaattcttatcaaaactagaatcattaaatgatttaattataaatcatgctacagattcattagataattatattttcaatggttatttaacaattgatgaaattaataataaaactccaattaatgaagttctaaacatcaaacaatctgatctagattcaacacctataccttcaaatgaatcttcattacttaaatttatctatcaaggtttataactatatacaagaatttcttatcttcaaaacttagacaacaacatagtaaatacttcccatgatccaaacataatcatactattaggtacagttctcattaaatgtggtgttaaacctccatacatactaataaatccttcctctttaataactaatttaaaacattgtattaaccctttatatttaggtttatcaccttccattggtgcttgtcttaaccttgttctaacaacttcatgtggatatgttattaatgatgcaattaatttagcaaatcctgcactacttgatctataaatccaatcaattgtttcatttaatttagtcttttctttcaatgaatcactacgctttttaattattatcttcatttgttcatataaaatccattgtattgtactttcaatactacctaaataacttgcacttaatcctctatacattgcaaaaaatccttcatttttaataattttcttaatacaatcaagggaattcttatattcattctttgttgctttatctaattgtaatcttgttttaattaaccatataggattggtaaccgtacttgtaacaatacctgcattaatacctgaaattaaatgtaataatgatgattcttcattacctttaaaataatcaaattttttaaaaatttctttactatatccataagtgaaaaaatttatacttcttgcaggtataacaccaattaaacttggtcctaaacctttaaataatgatcttgtaccttccattttataaacattatgtaaaattaaacatgtttctttaaaatgatttaatatactcttattggaatttgatttatacatattttgataaactgatgattgtaatcttgttttaacaacatcaaatggacatgtgaaaattgctccacacataccacctaatccacctgcaacaaaatgtacccatggtttaactgttggtattggtgtaggaagattatttatttctttcatattactatttttttcatcacttgctaaaaatggaactgattcatcaatatcattctcaattttaattaatttatctaaattatttgatgaatttgatgaatctttcattggggggaggggagggtatatttgcttatatagaaaaggctttaaatgaattattttatgataatgaatttttattgagataataataaaattttcatgttgaaaaatttataacggaaattacattttttgatttaaaacttattaatgtttaaaacttatagtataaaagatgtaatatataaaatatagataataaaatataatacttaaatgtaagtttcataagcaacaggagctaaagtagttggaacaccagaaacaactcttgaagatcttggaccaacaggttgtctctttaattgaactttttcaccagtttcctttgcagctgctctctttgcagaattttctttaactctatttaaaaattcttgtctacattttgaatgtttaacatgttcaattttaatatttaatcttttttcaatatatctatgaccaacaactttattaacaataacaccaactgctgattttgtaacattgaaaacaataccagttttaccatgataaaatttaaatggcataccatcatgaattgcaccattaactttaatatcaacaatatcaccaactttataagtttttaaatatgtagtcattgctggtgaaccatgtttcttaaagtcacgactgaatgcgtaacgagttctagatcttaaaccatgactatattatattatattatgttttgtaaattaattacattaaatgttagtattaatgtctcttttaaaaagatatatatatctctttgtaacgtcatttagacatattctcctttgatattaattaattatttgtacataccttttacccattttgtattattacccttggttatttgaatcaaatagaaatcaacaaaataatgaataattataattaaaatatttcagtaaatgtaataatatcaatattaaagattataatattttttttcacctaattgtgagggtagtaagtaagataatagtagggcataatattaatataagaaaaaattatctctgtgaccgcgaattcctcttttgggaagtgctgtgcgttctttttctgcaggggggttggtgccctctgtgtgtgcacgtgatggtgattacgtaaatttggacatgaatttttataatagtcttatagtagtagagtataggttattattacattattgatgatcgtattattagtatggttaacagtttattattaatttatattacagaaaaaagcagataaaaaatggtatattgaaaaaatatgtgaataatgtttaattataaaatattaaatatatcttactatattattgaataatttattcatcatcttctgcaccttcttcagatttagaaccttgagatcttctcttaactctacctgctctaccaccaccatatggtgaagttggagcaaattcaatatgtttttgagaatctaatctaaccataaatgaaggaattgaaacaatttgtttaccaactgcaatatgtctttgagtaattaaaactcttgcatgatgaacagattttgctaaacctaatttgaaaacttgagtttgtaatcttctttctaagaaatcttcaatttttaatgataaaacataatctaatttcattttatcttctgataaaataccaactctaactaatcttctaattaatgcattaccttcaaataatctctttggatccttttcatctctagttaataaatctcttgctgctcttcttaattttgataattggaaaccaattctataaatttctctcttattctttaaaccatattcaccagctaattttaattcaccatctaatctagcagtttcgaatggtctctttggaacggaataagtctttgagtaatttcttggagctcctatagtaataaaattaataatattaatattaatgttagaataaggttcaataaagtagattattacacgaggtcattacagggggtacgagtatatttacaataatttataatctcagataaatcataatggaaaaaaaataaaatatagatgcttgcaaataattgcattaatccataagttaaagtgtcgggagtttaacttatggattacatctaatatttacattaattatttccaaactctctaaagaaaaataaattattaatataaataattatcgtacccgattaagagataatatcaaaccagtataatagctggatgattaaattatccttgtaatgaccaataaacattgtttaaactattcaaattaatgaataggaatggatatggtttgtgtaagtgaaaaaaaaagttagtgtaatgtatacgtacttggcattttgattgacttagagtttggatgattaaaagaaagacatcaacaagagataataatgtgtaggaaacgacttttaatttataaagcggtagcgaagaagttgaaaaatttgaaattttttgaaattttttttttttttgtgcgtgaaaatttcatattgggtttcctatttgggtaattagggttaggagggtttattttaaaatgaaacatattattatcttatcttatcttatcttatcgtattagattagaatataattttagagtatatgttatatatatatatgggtagtagaaaagaataaataaaaagattggaatgtcaaatgtgaaaaaaagtttatttaatcaactctttgtcttttattacttgataattcatcatcaagtacaatttcattttcctttgaatggaaatctttaataattgaatcaacatcttcaatacctaaaggtctaatatcacccatttttttaatttgttgtgtaacaattttaatttgatcatcagttaaatttaaatttaattgttcaactcttgctttaattgcattccaacctgttaatctatttgcaaaatgaatatatcttgttaatccaaaatctgttggatttaaaatttcataagttgaaggatttgctaaaattgcctttgcatgaatacctgctttatgagtaaatgcacaaaatcctgtaattggattattaaaaggtatattaacttgaacaatttctgcaattaaattctctaattctctaattttatttaatttatattttgatttaacataatctggtgcacttacaaccattctagccataaatccacctaatggtacaataccatttctttcaccaatacctaaaatacatgtatcaataaattttgcaccagcctctaatgcagtataagcatttgcaattgcacatcctgtatcattatgaaaatgtgtttcaatttcacatttaacacttgatttaattgttctaattaattcataaacttgtcttggatttgcacctccaacagtatctgcaataccaattctattaacaccaattttatcaactgttgtataaatatttaataaatcaacaatatcacttctaaatgaatcttcagttgaaaatctaatttctaatcctttacttttaacaaattcaataacttcaattgcacttttagtaataaatgacatatctttaccatgagaatgttgtctaaggaaatttgatgtaccaatgaaaacattaacaccatcaactcctgtttcaactgcaattttcgcatcatgcatatgacatctaatatgagttaaaatttttgaattttttaaacctaatttacaaattgtttcaacttcctctcttgcttgatcacttgcaactggtgatgttaattcaatataatcaacaccaaaatcatctaatgctttagcaattttaattttattctctaatgtgaaaaatgcattagcaaattgttcaccttctcttaatgttgaatcaattatttcaaatctcggcacatttgatataaaatcacttggatttggtgcatatggattatgtgtagttgacattgtattttaggtagttagttagttagttagttactttaaaagagaaatagaactaagggaaaaggaagaaaaggtgggttttaaataaatgaaaagttttgttaattaaaatatcaaattggtcattaattgatttactcaaaagatatactgactcatatataaaatggaaaataatacaatagaaaattgaaaaattgaaaaattttaaaatggaaaaaccggtgcgcgcaatttttcattttgggaattacccgtttagggtaacttcggtttactttagagagagtaatatggatcaattgatgtaaagagatggtaattaataagtgaataagtgaataagtgaataagtggataaatattctatatttgatatcattgtacaacttcttttccaagataatgtattaatttaaaagtttcggggacaaaatcagatatctccgaaatgtattccagtaggttatttttatcggaaataacaatatcgtgctgttctgttatccataatactatatttgttgtatttagcaaaaaaagaggcaaacaccatatcttaaaaataattgatggaaaatttttttaacaattgtaatcatagcttcattgttgaggataccactgcattgacaaaaaaatatttttttgagtttttccaagaataaaaaaacagtataaatactttttttactatttttaatataccatcaaaatattaaatttgaaaaaccaggttgtatgaatgtataaacgcaaatcattgtatcatatttcaatatcacgtgactagcgaaagccaataaggaggctctaactcttcccatataaaaccttgtaattggcaatttgtccgagtggttaaggagaaagattagaaatcttttgggctttgcccgcgcaggttcgaatcctgcagttgtcgagttaacaatgtttatttttttattgtagtattataacacttaatctttgctatgctttataaaccttttacttatttttaattctttttgaactgaatagcaatgtatcattatcattaattaattaatacaattgatttcttcttgactgaaaatcttgttatcaaacacttgtagttctttccttatcactatttccattacttttctttaaccttttattatttttacaattaatatctctctttatataaggtttccttttctttggtgattgtttaggtttaacatttaatggttctacataaacataactttcaccacataacattaaaacatcctcttcttcttcatctgatattaatgatgatttaattttacattttattgaatttggatcattaacataatcactacaaattttagttattttagttaaatcatataatattttaataatttcaattctttccttaaaataattttttgaaaatttaatgtaattatttgatcttaaacagtttttggaaaactgtaattttatcaattgggaatctattaattaaattaattaatcttttaatttgtttatttgttaattttttagaaccaatttgatttaataatttaatttgctttccaattctatttccaattttagttgataaatataaatttctattccattcattggggaatttctttaaatcttcaataaatgttgaatcaatattaaattttttaaaatgtttccttaaatttactgctattatatcattaaatgcctcctcagcatcatttaaataattactatctaatcttccccatcttttaataaaattagctacaaatttattaattactctctcgttagataaatcaatcatacttaaaagaagaaagaacaagagtaagaaaaataaagaataaagaaataaagaaataaaaaagacatgaatgagcctttaaaaattaatacataaactacttacttacttacttacttactttttggtataaatggtgatacatttgtttcagtaaatggattcaatggatattcaggattgataatataccctcctttatccaattcagggaaattaactttaattttaccaattttctcttctttacttttactatcatattctctagtcatccaccatctagaatttttacttgatggtgcaggtaatccttgtttaattaatgaacttacttttgattcagctaatattgaattcattaatccaggtgtttttaaatatccatcattattacttgaataaactttttgtttagtaatttcatataattccctttcaattttggatttaataatttcattaacaatttcaagtcttgcattgaaaattccataaactggtttatgatcactaaatttatattttggtatactattatatcttaattgttctaatgatgtaaatcttttatccttagtatgagttataattctatctgtccatgatggaactctttgtttctctgatgaatcatattcatcagtacctttatcaaatttatatgttggtttaaaagttatttccatttcatcgaaaaatgggaaactcttaccattagtcatttgtaaatttaattgatcatattcaaataattgttcaataattttcctttcatcaagttcatttaattgtgtatttgatgatattaatttctcttgatttattgaataaaatgattgttgatcatcttcatcaccttctttatctgaatttttttcatcactattttcaccagttattttcagaataatacttgttcttgaaccatttcttgaatgatcatttcttaacatggggaaattagaatcttctgatgattttggtaaaacaactaatttctttactgttattttaccataattatttgattttggtgatttattattaacttctggaactggtaattctttaatttcagaatccccttcatattcaaaatcactatctttataattataatcatcagaatcaggttcaatttcaatatcatttaataataaattaaagttcctacgtgttaataatttattctctaaatcttgttcattttcattctcaatcttcatctcttcattaaataatttcttactcttctctcttaatgtttcatgattatcattaacttcatcatcattatttgttaaattctctaattcctcataaatactattattatcatcattataattatcaactgatacactaatcatactttccatactttcattacctaatgggaatttactattattattattattattattattatcactatcactattatgtaaatgtaaatgactattaatacgacttagtctatttttatgttgtaactgtgtcttttcttgggtatctatttgggtattggtattggtattggtacttggaattttatatcctaacaaagttctaacagcttcatttggtaatgcaattctaaaatttaaatctcccatccaaataattatatcagattctttaatatttttacattttttaaatgttaatccattgaaaattgttttaaaattttgatgtctctcttcactattactttgacctgcagctaaatgagctgcaataaagcaaattcttgaatttttattaaatgtaaatgtaattgcaactccacctttattagcactaatacctttaaatccagtttttttaacacttgtttcaatattttgtaaattatcaataatttcaacatttgaataaattaataataatataccacctaattgttcacctcttaataattgatatcttctcttttcattttttgcattaattgtatcattaaatttagattcccaaaattttctaatttttaaatcaattgataatactttacttggagttaattcaattacttcctctaatgcaattgaaattaaatcatatttattaaaattatcaatttcagggaatattaaatcagttaaatcaccatcatataaaactgcattaacattaaatgtaactgtataaattaataaatttttaaaacttgtaaatttatccctattttgtttattaacagtttgaattacataattatgaattggatcaattaatttaacttgaatttccttgtttttcctacctaataatctatcaaattgattttgtctacctgaattactatttgaaattaattcattattatatgaaacatattttttactttgttcagcaaatttaccaatcaatccaccagttttattctttgttttaattgatgtattataagtatctgataatttacctaatgcatgaccattagaatcccataaaatattatgtttttcccaaatatctgttgtaaaattattaccaaataaaatttctaataacatttcactcaatttacattcaatatgatttgatctatcatttgaatctaatgtattaattaaaaaaattcctaattgttttgatgtaatttccattttatttaaatcgaaaacaaatgatgaatagtttttcaattcatttaaaatttcttcattttgcattaatattgaaatataatctgatttacctcttaatttactacttaaactattttcagggaataatttattatatttaacatttaaatttaattcatcattttcatttttcaattcactaaatgcttgaaaatatctattacttaattcaggttgactacctttaatacttaatgaatccaatataaaaatttttttatattcattaattaaagtttcaaaaaatctattaaatgcatgtcttgaagcatcttcacttcttgggaattcaattttagttgttaataaatgattatctaatttccaaaataatggtacattaccttttaaaattgaataactaattaaattatcacctgtataaataattatttcagtttcaacaaaatttgcaacattaccttcatcatccatacaagcaggaccaaataattgaccaattttccttgaatcttgtcttgaaattatagttatccaacaattttcttcattatttaaaatttgtaaattaacgaaacctctaattaatgttataaaaaatttacccttatcaaaaatcattctttcattatttgataatctatttctaaaatttgataattcataaatcaaattaatattccaaacaaatctacctgaataatcatcttgaatatcattaattgttgtataagaataatttgaaggatttttcaatttacaatcttgtaatttatttgctaaatcagtttcatttgaataataaaaagtaccagtttgaagtaatttcataatcgataaaatacctgatgctatagttgatgtattatcctcaattgtatcattataagtaaatacttcaccattaaaattaataaataaagtatttaataatttgaaaacatttgtacctggtatgattgaaccaacttttgatttaccacaaataaaccctgcatatatgataccctttaaagaaatcataccaataaatccaaatatttctctttgaattaatttaaatgatgataattgaattgtatttcttggtataaattcaattaaacaacttgaattattattatttattgtaggatctgattcattattattaattatactattatcctttgaggaattgtccatcaatatcaatacataatcattagaacatatagctattgttctagttatatcattaacgtacaattccatatcgattcccagtgcttaaaagaagagaaagtagtggcatgtgtggtggataatcattatcattaaaataattacataatctattttaagccattctgttttatttattattattattattattattatcaaaaaactatacaaagactaaatagatataatattatctctaattgcaaaattaattgaattaattaatgcaattaaaccagattcagttacatcttcattaataccaaccccccaaataattgtttcaatttcattaattttaattccaatataactaacagctttagaatttgaatctttacctaatgtatgttcattataatgtataacatcaatattaattttaaaataagtcgataaagcattagcaaatgctgataatggtccattacctttaccttgtaattttaaatcaagggtattactttgaattgatgcaataatttgtttatttttatttgtttgatctgtaataattttataatcaattaatttaaataaatctaacattttaattaaatcattatcattctctaaattttcatcaaagataaaatatttttctttgaaaaggtttaaaatttcatttgttttcaattctcttttcttccattcagtttccatttgaacaaattttgaaaaattaatttgtaaacctcttggtaaatctaattctaaatttcttaaaataatccatgatgcaccacctttaccactttgagaattaactctaataattgcttcataatttctaccaatatctttaggatctaatggtaaataaggcatattccatgtaatatcaccagtttctttaactttatcttcatataatttaaaaccttttttaattgcatcttgatgagaacctgaaaatgcacaaacaactaatgaaccaccatatggagctcttggatgaacaggtattttattacatttttcaacaatttcaataactgaattaatatttgaaaaatttaaatttgggttaataccttgagtatataaatttaatgctaatgtaactaaatcaacattaccagttctttcaccattaccgaaaagacaaccttcaactctatcagcaccacctaattgagctaattcagcagctgcaattgcacaacctctatcattatgaggatgtaatgaaatacaaacagtttccctttgagaaatattcttagagaaaaattcaatttgatctgcataaatattcggagttgacatttcaacagttgcaggtaaattgaaaataattggattctccactgttggattccaagcatttttaacagcttcacaaatttcaattgcaaattcaggtgaagtatcagagaatgtctctggagagaattcaaattgccaattagttctattatatgaaggatcaggattttcctttgttaatgatttaactaataaagtacattcagttgctaatttaattgattctttttgtgacatattaaaaattatatttctaaaacaatcagaagttgctaaataaatatgtaaaattgcatttttagcaccttttaaactttcaattgttcttttaattaattcaggtctacaaggtgataaaacttgaattgcaacatcattaggtgaattttgaacacaccatttagtaaaatcaaaatcaatttgtgatgcacttgggaatgaaacttcaatttctttaaaaccaatttctaataatttattaaaatattccttcttttcagtaattgtcattggatcaggtaatgattgattaccatctcttaaatctgttgataaccatcttggaggtttaattaattgtttatttggccaatctctattttgtaaattgattttaggattgaatggtttatatttaattgaaggatcttctaacatcatctttccagttgggttattaagtactaaaccaaaagaaataagtaattaaaaagaagatattaaaagaagataacatgacttataacaatgaaaaactctcgccatgtttagtggggtatagtcataaggtatggtataagtgtatgagtcatatagttatcaatacagctattactattagtataaaagagtaggagtatgtattatagtattggataagcttaaatgtgtagataactagtaaagtacaagtaagaagacatttactatgtgaaataaataaattttcacttagttatttataattataattattatacttatttataaacatcttttccattaaacaagacaagacaaatggttaaagtaaaagttgaattcttaggtggattagatcaaactttcaacggtattaagaatcttaaacttgaaatagatggtgaagaaccaaaacttattgaattaattaataaattatcaaatgaatatatcagtaatgaaaaagattttgaaatgtttatacaagaaggtacaattagaccaggtattttagttttaattaatgatactgattgggaattagaggataaagaagattatatattagatgatggtgatttaatttctttcacaagtactttacatggtggataaattattgtataatttattaattataaatttataatcattttgtaaataaattattctatttcttgttttagaaatttcaaatatatcaatatcttgtcttggatagtcgtccatggtctttaatgggtattcatatctgcattaagtgaattaagatattgaaataatttgttaaggtcagattcaatttgggatttaaatgttgataattgttcaaatgatagatcagtattagaatctaatgatagattgtatgtatatgatgacatagtgtattagatactatactatactgtttataaagaaattatataataatatataggaataaaaaatgcatgtattacaaatacaaatacatatacaaaagtatgaaaactattattaactaattaatttttcttcttctttttagaaattgatttatgagattcaggtaaccaagaatctaatgaaggagaaggagaattagttgtagatgatgttgtagaagtagtagatgatgatgatgatactgattttttctttggatttgaaggtaataaagattcaggtaaaatatttgataaatatttacctgcaaatgtaatataaatataataaccaattgcaaaagttgaaacaattaagataatttcagaaataattaattttggattaaaaattgaaattgttggttcaataacattaattaatttattctttgaacctaataacataaattgttcttgataaacaacataaattgcaggaactaaaaggaaattaccaattggcatattaataccaactctttgagtgaaaggagttgtaacattattagtaacttcaattggaccaatttgtgaagcagtaatattagccataatttcaccagtaactggatcaatcatttgaccaccaacaccaacaattgaaacatcttgaggttctaaatttttaaaattatataataattcaatagtttcaccattaattaaatcatcaattaaacctgatgaaatatcttctttaaatgcaatattataatcaataataaaattaaaaggtttttcaggtgttggtacaaaatttggatcagtaactaattctctttcttcaataataggagagtcatcttcacttacttcatcattagctaatgagaagttaaggattgataaaagatataagaaattaacaaataaccacatttgttaaatgaataatctaaatgatattatcataatataatatcaatgataaccaactgaataattgaatgtgttgtccattatatcttccaatcttccaatcttccaataattacgtaacacattacgtaatcaaaaagagggctggttggtggggaaatggggcaaaattacccttttaggaaatattaccttgtcttcagtttaataatctttaaaccagccattcaatgagtatataaagaactggttgtttcctgtatgtcatgatggtggtgagtaagtagcaggtgttggaggatgttagagtttttcttattttgattgattaaaaaaattaattttattatttcttaaatttcaaatactaataccacaaccaacaagacaagacaaaatcatctgtgatacctctttttaattaactaacttaactaaccaatcaattaactcacccatagtcattcttttacagaactaatacattttacttattttattcataaatatttttattctattatcttttttccaactatagtctttcatttattctaatatgatctttaacattaacattaacattaaaatttatttattattttcattatttacaattgtcaattcattaccaattgatattaataaaagagcaattgaaacaattactgcaaatccaataattgaaactaaattaacaacagttgtaccaaataattttaaaactgttacaactgaaattaatggtgtattaggtacttatttacaagaagttgtaacttctcatattaaatcaacctatgttagtgaaagtatttatacttcaactgaacaaccttcaacttattcaagtacagttattgaaacaagtagtacttcctcatcaacttcttcatcaacttcttcatcaacttcaagtaccatcacatcatcatcaactcaatactccactactaatactccaactactactgaatcatcatcaagtaccacctctacatcatcaagtacctttacaacaacttcatcatccactactaaagctgagccttcaccaactacatcatcaccaacaactacaccaacaataacatctaccacctcttcctctgctacaccaacatacttcccatacactacggcatcagcaggaggcacctgttacataatgtacgctgaggacaacgataccagtgtgtacacagatgaaacaccatatacaacaataactttaacaagcgttgttgccactgttacaatgacgaggtgagtttttataattattatgtatttgtatattgtatatctctttctttctttcttttaacctcttttattaatggacactgtagatataccggatctatctcctggtatagatcactctatagagactgctcaaagagtttatatgaataatgggaattcacttacttctataaatactttctcaagtgatgaaattgatttagttaatgatagtcatgatgttactaatgataataatgatgataatgaactatttgaacattataatggatcaattaaagatttagctgataaagtagtagtagatagtagtccaatacctattattgaagaaaaaccaatacccattaaaccaacaccattaaaatatgataaaccttataaaaattatagaaaaccatcaacaattataaatgatgaaatgaagagaattgaaaataagataagtcaattagaattacaatttaatgaattaaataccaagtattataaactggagaaagagatcaattatgttgatgaaatactttcaagtgaaaattccagcaaatcaatccaatatcagaaactttcatttgcaaggggtaaattaatggataaattacaaactgtaaagaaggaaaggtacgatatcggtgtggtgataagtaagttacgcaggaaagtcaatggagatgatagtggtgatatgacccagtattttgcaaggaatgtaagtagttagttaacctatacttaattataagagaaaccctcattaaaggtattttccaattgtttgctatttaaatagattttatctttatctttttcttttcaacttctttatcttcgtttctttcttttaatcaagtacattcttactctatattgtattgtaatatactatactatactattacttaatgatgatattaaatttatcttacctgacgcatataccctcgtctttcaacgagctggtttaatggaggttaagattttatgactacaacggtatctgataagtattgtttgtttcttttatttgtaaacactctttccttccttccttttattaacaacataatgtcaaaatttggtaatcttaataaaagagaatattataatttaaaacatccttctccattacctattataataccattatcttacatatcaaataaatattataaaccaattgaaattttaaattcaatttatgatactttatgtcattttataattaatattagtggtcatgactttattgatgttatatttgatagtaaattagattcttcatttaaaataacaaattataatgatatgatatttatttggaataatggattttatggtaagggtaatttaagtaggagtgaaccaacttttgaaaagagaatgttacaaaaaattaatgattatctgaataatgataataataatgataaaaatactaaacaagatacaacatttagtgaagaaataactaaaaatagaagatatttaagagaaatttggaaaaatgaaagaatttcacttattaaattagagaaagatataaagattaattcaattaatggtgaaatttcaattttagataaagaaaagttagaaattgaaagagaaaaattatcaaaattaaaggatgatttaattaaaggtaatgttagaattgattcaaatactccaattaatagtgattcaattaaaaatagaaatactttaagaattgaagattatgatattataattgattctaataatattaaaaatattgaatatttacaattagataattgtgaaacaatttatcttaaacaattaaatatgatacgaattaattttgataatataccagatatttcacttacaaatttacttaagaatttaattgaaatttatgattttgaattattattgaattatgttgtttattatcattataaaactttaggttggtgtgttaaaaatggtttaaaatttagttgtgattatatattatatcaaagaggacctccattctctcatgcagaattctcaattaagatagtaacaaataatgaaacagattcattaattgattattcagcaatttcaagagttgtttcaggtgttaaaaaaaatttaatactttgctttgtaaatcatccaaattttaattcttcacaatggttaaatatttggaataattatttaattgatggtgatttaatttctttattaaataatttctcaattaatgaaattaattggaaaagatggacaccttcaagaactagaatgtagtaatttattctttataccaaccctttatatgcatcaataacaaatttacaatctctatcacctttactaatacaaacatatgaattagtaccctttttattattatttcctggtaaaatacatttaatttgtgaatcaggaaatggacatggacattcacttgcccttttaacacatgttaatgtatcaggacaaataaatccattattacattcttgtctataaaatctatcttgatatgaaatttctccctgaccttgaccttgaccatgacgatgttgttgctgttgttgttgttgttggaaaaattgatcaaaaaatgcttctgttggtattatacccatcattatcattactattatacttataatattcattgtgtatgtctattgtacttactttgaaaagaacacgtagtaaggtaaggtaacctactataattaattttcaaaccaatctcgaatttgaccttactctctctcttagtttatttattctatctgaattattgctattcttcatgtctatctcatattcaactggataattgatagtttcatcaggtatgtagtgtcttttaacatattggtataatttctcatctttattaaaatcatcttcattaataaaaggttcatcatcatcaaattcattaataacttcattgatattactcagatagttattgttattagtaataatattatttgattcttcaagtaatggtgtagttatagtatcaccattattattattattcctgactatttcacttagtttacttaatcttggtattcccttcatactattattattattattactaatattattattattattattaccacttttaacactttcattatcaattcccaccttcaggatcaacattaatccaatatttcttaccattaccactaattcttaatccttgataaattttttgattaaatgtatctgatttatcataaattttagaatctgtaattgcatcaaaatttcttaaattataattatctccataaattgtagttatctttaaatcataaattaaatcaccaatattaataaaatctttaattgcaaataaaattttcattttacttgaatcaggtattttattaattgtaaaatctttataagggaatgatttccaatgtaaaattgcaaagaaaatcatttcaaaacttaataaacctattttgaattatttcacctgctaattcattttcaaaaattcctaaccaattcattataccaattaaaattccttgccaatatgatgcaaatataattaatttaacacataaaaatttactccatggttggaaaatatttaattcatcatataaacatttccaaaaaatacctaatgaatataatgaaattgtaacacttaaattatataataaaccaatccataatgaaatacttgaaatttttaaattattaatttgataaattccaattattttactaatataaataattaaaaataataatggtttaacccaaacatattgtaaaatacatctcttaattgttaaaaaatcttttggatgtgatatattaattttacctaatattaaattaattgggaataaatgtgaaattggttccttatttaatgtcattaatataatcttcctctctccacctaacattaaaactaataatttataaaatgtataaataacgaatgcttcataaatttccctgattggttcaattatactaccaattgtattattaattaatttactataacatgaaatggcgaaaagtggtacaattactaaaattctaacaattaatctctgttcaaatggtttcctgtaatttttcaattgtaaatatattccaattaatgatataattattgaaataaatgtagttataccacatattattaatatccaatgtggtagtttaaatgttgattccattacttaaataaaaaagaagtgttaaatagagataagataatatataattttttattagctgagcatttcatttcatacactttaactacatgttctttcttttataaataatgattttattatgtttattattacttataatacatattaatgcagctggaattgcagttcatcttaatattgcatcaagaattaaaaatcaattacccaattcaattaattcaaatttaaatgtttattattcaggtgctttccatcctgatgctttctataattgtattggagatttatcattagctgcagaaactgctcattggcctccatttttaaaagcttcaattgattattataatgataaatatatatctaaaggattgactaataatgaattaaaatcttttatttatggaattttcactcatcaattaactgatatttcatggcattcattaaattcaaaacaaggtttattagaattattaacaaatgttgaatttaatggtaataataaattagctcataattatttagatacaattggtgattttattacattacatagattatttgaaaatatttcaattgattatagaaataatttattagatattttacataatgattggcaatatccaattgatgatattgttaatatttacaatcttttaaattttaataaaattgataaatttaatttaaaattttgtatggatagaggtcattcagctttaagaggtgaaattttaactgttttaactgaaaaaaatttaaaaaatagattaaatattaatttaattgaatctccattaactgtatcaattttaaataattatttttatggtggaattgatgaaatatcacatactttgagtaattgtttaaatgaattagacaattggtttgatatgaatgatgaaataggtaatccttgggatatttgtaaacctttattcaaagaacattcaataaatgatttggaaaatataaaaaattgataaaattgataaattgataaaattgataaaattgataatttaaagataaaagaaaaaagtatatcaatagacttctcatcatcatcgggggacatttatttatctgctggtattgaaaattcaaaatttggtactttctttagtataggtaattaccttgatgaattaacattagcagtatctgctccatttgaagaaattgaaggttctatttatttaatcccattatctgaaatcttatccaatcaaaacacagcaataaaacaatctaattctttacaaataaaatcatcaacaaatattacatctaccttatcatctaatatccataaatttcctaatagatttggtgataagatgttcacatggagttggaatggttatgaataccttattgtatcagaacctggaacttcacgatttaaagtattctcatccggtaatttaatagcaatcttaaaatcagatcaaacaactaatattttgggtacaaatggtaaaaaacaatggaatttattatctgaagaattatatgattcaaataatgatggttatcctgatataataattggatctatatattctgataatttaggtcctcaatcaggtacagttatggtacttgatggtaagaaattttggaataaattgaataaatattcatttatgaattcttttatggatggatttaaaattattcaaattgaatcaattattttggaaactttccaaattcctaatcaattaattcaacaaaatcattatgaacattttggttcctcatatgctcaatcagataatcttatatttattggtattaactctattggttcaattacagtttttaacaaaaaaacgtataaatttattggtatcctaaatcatgataacgataatttattacttaaggataaattttataatattgaaaggaaaaattcaaaagaaactggattatacgcttataattctaatactatccttacaggtaaaattaatgataaggaatggttattaattggatcccctggtttctcttataataaaatttatcatttatcaggtattgcatttttatatattattgaacctaataataacattaaattaattaaaaaaattataccatttaatttaaatgaaaaaagtgataaaagtgaatttattaattcaatgtttgcatcaaatttgaaaaaaataacaaattctttaattcttatttcaagtaatggttatgatgatggtaaaggatctttatcattacttaatttaaatgaaattttattagatgaatcaaattgggataaaggtgttattgatgctaagataatagttaaaggtgataaagatataggatttacagattttggtagtacttgtattcaatcatttaattttaatgataaaatatttttagctataagtttatctgattatttccatgattcttttggaaataataatagtttcagatctggtgcagttttactgaaaagtatataataaataaatagttacactctctatatataaattatcatgaaatgtctcttcaattgaaattactttcataatagtcaaacaagtaaaaattttaatatggcaaaaaatatattggacgagaccggagtcgaaccgatgacctttcgcttgcaaggcgaacgcgctaccaactacgccacacgcccaaaagataactgatccctagcaggatcgaactgctgatcttggcgttattagcaccacgccttaaccaactgggccaagggatcttgttgttgtgtttttttatgggtgttttttcaaactaagcgtcttctgattacgtaagcaaaaaagaagtataattaccagaatactctttagttttttgaaccattaaccaaatgtgatgacaatgttgataattttaatttgtattgaaacataatattactgtacaatcaagttgagttgtaattaaaccactctttcttgaagtctattctaacaacagccaaggtaatataaaacaaaccaaacgatatacaatgaaaaacattatgtataaaataacagcatttaagaaatattaacaaacttgaattattaagtcagtgaaataaaattgcacaaaaatgattattgacgagccgcgcaatgaatattagacaaatttgaaaagcatgtcatgtcaaggacattaattgatatattactttttattacaccttgtagactgttcatataatacattctataatactctataagtagggattttgtaactggtttaatacggataacataaactttatcatattttcaatctttactatatcataatgagtttctcagcaattttgaacggaaatgttattacttttgaaaatgatatttcttcttctacctatgatagatgtattaaagacttagaaatggtagaagtcactaaaactgatgataggtttaaatggcctttttttaaacaatggttttctcttgaatttggtggttattttactacttttgacttggaagaatttttcacctctactagttacattaacaaacctaacttatttggtagacttttatggcatgctattggaaagtattttactcaagactattacgaaacttgctattaaaagaagcaatattgatgcctattattatttgaattcggaatttactcaagtaaataatgctacaaaagttatgttagtcaaaagagctttagatatttggcaatctggtagtattgaagaaatggttgaggcaatagatttggttggttattatgttccaagcataaaagaaattggtacttatattttctgctctaaattatcaagaaaagatgccgtaagtttcttaaaagaaattgattgttatgaatctaatgatactttacaacctgaatcattgtctatccaagaagttttccgaaagtataatcatttcaaatttgagaattatgatgatgatgataatgatcatgatcatgaaagtaaagatgtatcaatgcaagaggcaaatgttttacttgaaaacccaaattatactattccaaatacatatcaagaagctattaaaacaccacaagctgaacaatggaagaaggctgtattagaggagcttaatctaatgaacacgaaaaaagtttatacattagttaataaatcaaaaattgctaaaggtaatttaattgttgaaagtagatgggtgtttagtgtaaaattagatccagtgacaaggaaagaaatatttgaagctagaatagtggcaaagggatttacacagaagaaaggtgttaattatcttgaaacatattctccagttgcaagatttgaatctgtaaggttggttctttgtttatctgccatgatgaattgggatattttacacttaaatgttaaaaatgcatttttgaatggtaaaatagatcatgatgtttatttaaaagctccaaatggaacaactaaaaataataatttggtttggaagttgcaaaagagtatatatggtttgaaacaatcttcaagaatatggtatttaacattcaaaaaagttttagttgatagtggatataaaaattcaatattagaaccatgtttattttggaagaacggtgtgatgatgttgttatatgttgatgatattttaatttgtggaagtaataagaaattaattgaagaagctgcaaatgtattgaaaagaaattttgaaatggaagatatgggatatccaaaggtctttttaggaattaatattgaaaaaactgaggatggtttaagtttatcattagaagatcaaattaataaaatagaaaaggaatataatgttacagttactgaaaaaaagttgaatactccattggtaaaagattttgataagatggaagataattctccattattgaataaaattgaacattccaaatatagatctattattggaaaattatcatttttggctaatacagttagattagatattgcttttactgtttcttatttatcaagatttttgaacaacccaactgaattaaaaatgaaagctgctaaaagagcattacaatatgttattcaaactaaacatttcaaattgtattatcataataagagtccagttaaacttaaatatactaattttaaatgctttgatgaaacagaaactgaagagacggataggacatccaaagaaagataaattgaatttagttttagtttcagatgcatattgggctggagataatggtgggaaaaaatcacaatcaggtaatattgttttatttaatggaaatataattaattgggagtctacaaaacaacaagttttatcaaaatcaactgctgacagtaaatatgttgctttatctgatggactaacagatgctgttagttttagaaatttattaaaagaggtatcaatttatattccatttattaatgtggttgttgataaacaatcagctctcacattgaaatctaatcaaactgaaaagagaactataaaaattgatattaagttttattatattaaaagtttagttgtagatagggttgccaaaatgaattacttaaatactatggagaatattgctgatatgttaactaagatacttgatgttacaacacataatgaattgtcaaaattaataaacaattaaaattttggcacatggccagttttttgtataatatcacttaaacaaacagaataccagagtaattcagagctatctactgctttagtttttaccgcatttttaaaagaacaaactgtagaatctttggagctcaaattaatggtatacaatgcttgtttcattaacataatttacctaaaaaaaaatcaataaaaaattagacttaaccgacaactgcaggattcgaacctgcgcgggcaaagcccaaaagatttctaatctttctccttaaccactcggacaaattgccaacttgtgttttgtaaatgaacggatgcttgttatttcttatattttaattattacacatttgtgaattgttattaatgattaagaatgattatgaattacttatttaggaaataagattattaattactatatttggaatactcgaataactaatattaaatatagaaatcatgttagaaagattataatagttttggaatagattcgagaaagttctatcatccgcgagagagaaggttatgagaaatataaatattggaatactttcccaacatcaacatttaataatatcatttagagatacttacttaaacaccagttcatccggttgaatactgagttacaagtttacatagaatccttatttatattacatagaaaagtagagagttacatttaattagattacatttatttatatttatttatatttattttaataagaactagactataacttaataaatactttattcaagtttaagaaaggatcggtcgttgttaactattacattccaattataaattaaagatccaacgacgaacctcgaccgttcactttcatgttttaaaaagtggattgttttctatgattggtagttcttaattacgtaaataaaataaaaataataaaataaaaataaaataaaaataaaaataaaataaaaaataaaaaaaaaataaaataaaaacaaaaaataaaaataaaaaaataaaataaaataaaaataaaaataaaataaaaaatataaaataaaaacaaaataaaataaaaataataaaaaaataaaacaaaaataataaaataaaaaaaaaaatgattgaaaaaggggccctaaaagctactacaatcgacgattcaggtcctcccgaccctcaaaacgttactaaaccgcccaacttaccccatggtgagttcaacaagttaccttcagtctttgctgaagaaaaagaaaacgaaggtttgaaccaaactgaccatgaaactcaagacgaagatgaagatattgaatttcaagattgcgctgaggaagatgaagtagtccaagaggtaaatgcagaacctcaaccaaccatgacgttggctcaaaaactccataaaacaattacggaggcaaatattacggttgataaagatcatctttatcacctttcatactttctaaaagttggcaaagatcaatttttagaccttgaaaaattacaagaaatcttatcctctttcttaaaagaattagaaagaaatattaatactacaaatttagcagaaatgcacaaagagtttcaatttatctttgaagattattacaaaagcaaagataacaacaacaataatattattaaaaataaaaaaatcaacaaagttcataataatatgagcaaaccaattgatgcaccaactgagaatacaatggaagaaggtgcaaacatgtttaatactgataaatacagtttaaaaattaacctaccattggctgaaccaccgatggaattattacaattagtttctaccatgttagtagaaacatttaattcatatgatcttaacttaatggatcaatcttttgaagaaaacaacacacttgttgttttaaaaacggagttccctcctttcatcattaaatctaaatatgatgaaattattaaaaatctctattcagaatacggagaaattatgtcttgtcaattaccacaagaaaaagaatccaaaatggcattcaatatgaagttctacgaacaaaataaaattatttacacagtgttaaaactaaaatcatcagttttaccacctaaaattcattccatctcacacacaacaggtggaaaaacacataaaatccccatcatcacttacttgtctactgcacctacacattgtgtatactgcagatgtacagaccacactacagctagatgtccaatgaaaccaagttgtagaagatgttacaaccctagacataaggtcaaagaaggtaaaattccaaagaatggtcacagagaaattttctgtccaaaatcatcggaggctgaacaagaaaggttatttaattccctccacccaaaaacaagagagaatttcttcaaaaaaactctctcaagatcattaccaatgtgggcattgagaattagaaacgcaacggttaatgatcaagtattttacgctcctgttactccaagaacatcaactacaaatggtaatgggaaaagaagtagagcccaaacctctacaaacattttaaatctagatgcagctgttgttattaataatgacaaagtagattcagatggcttctctattccatctaaaccgaagaacttatctaggtcagattcatcatcatcaatagtcagtaacgttgataatgcggtcaatccttttcaagtattggaaaatgtggatgatccagaaattccaaatgaagatgaaaacatccatagtgatgaagagatagaagatatggttgttgaaactaagcatgccgaaactacaagaagtatgccaaaaactccaactcaacctagaaatgtcagaacattagttaaatcttctaaacaaggtaagagtgtagcaactggtacattattagatgctaaaaaaatagaaatggcattagaaagaaaagagaaacttgaaaaaaagaaatctcaaatggatttagactcacaagtctaattcatttaattcttcaagtttaataaaatataaaaatataaaaattaaaaaaaaaaatataaaatatcataatgaataagttaaaaattttaaattttaatattcagaaggcaactagtccttctaaattaattcatattctaaattatgcaaaaaataaaaaaattcaaattatgtgtcttacagaatttgatctaaatcaatcaactgaattatcttcaattcaacaattattatccaatttcgatttcaaaattgcgattcaatctgttcaacatcgaacagcaattatttaccattcttcaatagaaatcatttcaaataatatttttccaaggcataatcgtgataatcaacttgcaaacttttatgtctgtgatataacaataaatttcaaacaagaaaacttaactatcatctctgtttatgtaccagtttacaataatgttaatgataacagattccactgcattaacaaaaaagattttattgacacattatgtccaactttatcatcattatctcgtggtgaaaataatctaatcatttgtggtgattggaatacacatcctatggaagcaacaaatttaaatcgtattgaatcatttcttcatcaacaattaatggaaaataatttatatgatattttcttccttccaaataatagaagaagtatatgttacaccaaccacggttcaaatggaacaaataatcggctagaccgtttccatgtttccttcaatctgctaagaaatatcaattttaaatatagagtacatcaaaagctaccgtttacaacacatagaccggtagtatgtacattatcagatatcaattcaaattctaataataatataattaataaagataatttttacaaaagaataccatcaattcctgattacattattgaaaataaacaattatataaatacattttcaccaatgagattctggatactaaaaacccatcaatggattataatgcatatatgcaaagagtttgctggaaaacaaataaagtaattcagataatgaaacatttaccttcatataaggaaaaaatatcatctaaagaattaggatttgattttaatgatcctcaattcaataatatctcagctaatctctcaaaaaacttcaagagacttagacttagatttggaaaacattcaaatgaagcaaatttggatgaaaatattataaatgatgcaaattcattttattcaaatcttttcgcatcaaatgaaatttattcaaatcaaaatttaaataacaaatttgacaagttcactgaaaatattaaagaacaattaactgagaaagagaaaaatgatttaattaaacctttttcaaaacaagagatatataaaaaccttctaaggctaaatgaaaatggtccatcatcaccagggactgatggtattacttacagagattggaaaaacaactgggtttctgctgctgtgattctaaccaacatggcaaattatattcttcaaggcaatttaaccacaactgataagattggtaaagtattgataaaattaattcccaaaaagagttaccgacaagatcttccattaatagatgatctacgtcctatcagtcttacaaattcatcacttagattaatcaacttttctatttctaatagaataatgcctattgcaaacaggattatttcccatcatcaacaagcatttatgcttcacagaaatattcatttacatattgaaactgcaaggattcttgctaatcaaatcaattcatcaccatcattatccaatgaacaacatatattattagtagacttgaaaaaagctttcgattctattgatcatcaatatcttaaaaagatcttagaaaaatttgggttccctaattcaactattgaagcaactattaaccaatctaggttagcatcggctaatatagttaatcaaaattggatccataaatttaatattccattaaggagaggtgtaagacaaggtttacctttctcacccctgatattcaatcttgcaatacaaccactgattattaaactccatcaatcaattagaggaatgaaatacaatccatacaatgagagaggtttaaatgctaagctttttatcaatattctagcttttgctgatgatatatgtctgtttcaccagaacaataatgaactattaaaatcgctatcaattttaaataattttgctcaaatttcggatcttaaaataaatgaaaagaaatcaataatttttattaataataaaggtatcaataatatcaaacaatttgctaatataaatcaattgaagctatcaattttagatatcaaagaaaatcctatctatctaggaattcccttgttgaaaattaactggtacaataaaataaaccaattgaaaacaagactaaggaaaactatgtttttagatctaaatttatatcaaagagtagtagctgttaatacttacatttattccactatctattattttgatcaacatgagccaattccggatcctcttttaaattcttttgaaaattatgttaaaaaagaattagttaaatatttaccgctgaaaattgcagttagaagaatcaaatggcatcaacctcacaaaaatgggggtatgggtctgatcgaccttggtaaacaacttcaaggtagaagagcatatttcatttatataacgactattaaacagaagttaaaatttataaatgaacatcctttgacattaataatctcacactcattacaaggaattattaatgttatgatcagaaatcactacgtttatcattgttattacaaatatgttgaaaattacatactatcaaatagagctgtacctggaactttaccaaaaataaaaataccaggcactatttcaaatggattgatttcaacatatccgttcagtcttcttctgcataaaaatcataaaatatggggaagtaatattactattgaagaaactctttcaaatgaaatgtcaaaggttgcaaaacctaaaataataaatgtaaatacagggaaaataataatcgatcttgaaccaaatatcaatttcattatcgaacaccctgtgaattacaacatggatgaagcttcttcaaaaacattagcaccattaatggtgtactctaatattttcccatatttacaaggatggtattatttaactaatattcactcagattttcaggttaaagaaactacagatttcaatgcaacatcgttattttcaatggtagaaaaaaatgttcaaaaatggaaaattgtagaaattttcaataaaaatcaggaaatcaatgttgaatcatttaaacacttttctaaaagattttacaaagaagaatttaaaaataaatttaatgctgattattgggatggcaaactagaccatcaactggattgggaaacatgctttggttggttgggtagaatcaccaatcaaaaccatgttgattttaatgaattatttgaattacaaacaggaatgttgaattcccatttttatcacccttgccaattctgcgaaggggaaggtgggactcatcatgtctttttcaactgtaaaggaattgaaataattctaaaagaattagagataaaaattgatctaaagaatattgttggtttaatatcaacaaagaaagatgcttataaagcaaatataataatcaagttaattatattttttaacaaacaatgctacaaaagcaataagaatgatccagagtttaggataacaaaaagatatattaaagatacatatttgctattcaaatatgaaaaatttagttcttattagatctaaattagatgaaaaagattgagaataatcaaacagaaataatttacatttagttcagtatatgaagatatattgaattgatgaagcatgaataatatatgcgtataagtaatcaatctgtataaaattgtatattttaatgaaattaatgtaaaaaaaaaaaaaaaaaacaatgctacaaaagcaagaagaatgatccagagtttaggattacaaaaagatatattaaagatacatatttgttattcaaatatgaaaaacttagttcttattagatctaaattagaagaaaaaggttaaagaatgacctaatagaaataatttacattgagttcagtatatgaagatatattgaattgatgaagcatgaataatatatgcgtataagtaatcaatctgtataaaattgtatattttaatgaaattaatgtaaaaaaaaaacgtaaaaataaaactcattattttttttttcaattgtaaagtctgttctaatctactaaattttgttgtaatctaataattctagatgcaaagtccattttatgacaactgtaaaagttatttgaagaaactaaataaaatataaatgaataaattaaatacataactaatgaaagaacttgataaaaggaaacaaatacaacgaagaattccaatctttaccgacgtttctttttctgatttataacgtttctttttctgatttgcaagcaatacttaactctaatcagtttttaaggctcaaatcaataatacaatattattatgtattatttagttttgcttaatgtatgtttgcatgcaattaaatctttagtatctggatctttgataaatcttgataagtatgaggcagcatacgataaatctgttcgaactgtactagcaggaaacaacaacttccctaccatgctgccgaatgctgtagcatctgattctgaaagtttagaaccatcatcaatagaattaacatttgaaggaagtgatctagaaacagcattacatccagtcataccaaaatcttttaacgcattgtttaaatatttattaagatgcagagatataccattcaaactctgcaaagttttcatacccaaaaaggtattaaccaaacccaaatccttcattttaaaacttgaattcaacaacaatttaacctgatcaattagggccatattattagtcaaaattaataaatcatcaacatatagtgcaactaaaataacttcatcattgacaatcttggaatataaaccaaattcagataatgaccgtttaaaacctgcagacatcattacattgttaattttcatattcaaacaaagaggagcctgtttcaaaccataaagactcttacaaagacgaaataccatattttcctgaagaattaacaccacctggaaccttcatataaatttcttcttcaagatcaccattaagaaaggctgttgtaacatccatttgatgtaccaccaatttgaattgtacagcaatagcaaataagattctaatactttcatatctaaccacaggactaaaagtttcaccataatcaattccttgaacttgtctaaatccttgagctgctaaccgtgctttaaaagttggtggattagtattatctttgatattaaacacccaacgacatccaattgtccttctatgtgaaggcagttcaactatatcccatgtatgattttctttatgtgcccctaatttctttttaatggcaacttcccaaaattcagcatcaggtgaattcatggcttgcttgaaagttgtaggaattgaatttaaagctgatggtatagaagcatctttaatgaccttgaaaatagcaccaagaaattttttaactctcttgggaggggggcgttcagtgtcagtaacagccgaaattgatcttaccaatggaaaagaggacatcagtaagttgattaatcaagtctaaatctacttgtacaattggaagattatcagcaatttcagaataaatatcatcgatataacgaagatcaacctctgcttgatcaaaacctaattatggaacaacacatgaagcagcagatggaacaacattttcattttgaatttcaattgaattttcatgttaaatttcattagagatattaagatcatcatttgaagaattagcactgacagtatcgtcagaaacaacagtagttaattcagttgttggagatacagtaggtgatgtagattgaacagagacaatggatttctcagaggcaacagtatctaacaaaggtgacgatttaagttcggatctagttgagtttgaagtagtattaggatcatccgatggaacatagctagaaccagtatcaacaacagaaatgtcaacaactaaaggaagaacagcactaccagttttagcatcaaaaataatgtcagaagaaggtaacatattagaaacaggccgatctgtagatttcttatatggaaataggttgtcattaaacttaacattattggaaataacgacatcattgagtgaaggagtaaaacacctataagctttatgaagggaactaaaaccaactaaaccaccagaaatagaagcaggagcaaatgaagatgttcttttctcaggtggaactaaaacataacaagcaacaccaaaaggatgaataatatcataatttggtttatactttcaaaaggagatttaccattaagattattagctggatatctgttgattaaatattcagcagttttaacaacttcagatcaaaaattttcaggtaaaccagatgaaaacaacaaagtgcgaaccttttcttggatggttctatgttttctttcaacaacaccattttgagatgaattataaggaacagtgatttgatgagtaattcccttttcaacacaataagcatccatttcatcatttcataattcgccaccattgtctgttctcaaagttgcagctttgaatcttttagaggcaaataaattttcagcagtttaaataaatgattttatcaactgaacagtatctgatttcttttgaattgcgataacatgtgtccatctggaataatcatcaacaatatttaagaaaaactgttcatcattagtgcccttaactgggaataaaccaaaaacagtagcataaattaattgaagtggagcactgttgaattgaggttatcctatttgtaaagttcattgataatatagataaaatataatttgtattgttatttaaataagataaacaaaagtaaaataaataatataaagaaaagaagaggaaatacaaataataaaagtgggaatacatgctcccttatatagtaataaaaaatgaaactttgtggttttgtagctttatgaaattgtggcttctgtaactttttaaaatatgtttagattaaccatctccacaagcactagctggataagtagttgatagtttgggatgaacttttgccatcttaccagctgcacatgacacacacttttcaacagatggaccacctgaataacctaataattttaaggttgcaggagaaggatgacctaattaaaagtgcattaattcagcattgaccgacttgacagtaaaagtctaagcacataatcaaagaaatacaatgaacctttggtagaactaatctgtaatttagaatcaaatccatatggaataaaataaactttgtattcagaaaattgaaaaacaccaaacttagatgctttctttactgataaaatattttgagtaccatcaggaacataatgaacctcatttaaagtaatttcatggccagtagatggatgaactagcttgactctgtactaatcccttcgacatctaagggttcttcagtattaccagaaactttaccactaataattttaaaatcaacaaattgatctttgtgagcagcaatatgaatattggatccagaatctaacaaatattttcttgacaaaggcacctaaacatttgaagccacccatgcaaaaccatttgaagtggtagtagtgaatgctgatctaccttgtttcggagcattagatgcagaggcaggagcaggagcagtacaatctctagcatgtaattttatttcaatttcttttaaagtttctcttaaatttgttattattgttcttgaccataaaagtttgaagaacagttgaactaaaatctttaagtgccacttcaacagctgataatgtaaatcaggtgcagtacaatctaaaactttagcgtaaaataatcccatcatttgagtaatttcagggattgataacaaacatttttgaaaatagctaaagctttaccagcagaagtgcctttagttcctggcatcaacagcagaatcgaccaaattggataattctctaacagagatgtatgaatatcttcttctaattaacactaatagatcaaaagtaacagcagcatccgtttcaaacttatcaaggatagtgagcaacattacagtgcaaaattgattgaacaattaaggttagaataccttgaatttgggcacttaagacgttagtagtgtcaggagttaacatcaaatctcccgaagcaaaataaacatcaacacttgcaccaacagtgtggccaacattctaccaacatagtttcccattttggatatttagggaatatagtcgagatatgacccataacctgttgtaatatactaactctaaatgcagcgtccactatcaacaacagtataagttatttaaactaaataaagtataaataattaaaaactaataagaaaaactctagaaaagaagtattattaaacattcatgggcaggttcttaaataatctttgttcattttttttataatagtggatacttttggttctttatttgaagatttttttcttgcattaaacttttctttaattgtagttttactggctttgatttttttcttacaatttatataaattttgctaattttgactttgcaagatattttcatctcaagattagagaattaaaaaattttagacccgttactaagcttactagaaatttttacaaagattggattgttgaggtgagatcatatgctattgacaaatcattaatcgaatttatcaaggaacattttttaacaacttacaaacaggttccaatctgtgcgcatttggttcattctacagagtttttattaattgatacttttaacaaattttatgcctttttagatactgttccaaacgtggttatgcctgagagaactgaggtcaatgctttgcaaaccaacttttgttctcgtttcaatcatggtaagaagagttttcccaactaaaccaagaaattttaacaatcaacaaaagaaatttactacctattggtgtaaaacttgttcttgtttcaaatgtaagaaggcaagaaatgaatattactcaaagaaagataagaaatcttattcaaagaataaaaaattcaatgctattaatgttgattgggatgtggacggttgcccttatctttctcaagaattaaatgaattatcaattgaagaaactgaaggtgttgatgaattagaacaatttattaaagaaacgaggttagtttagatttagctgatggtttagatggtattgaaggtatgaatgatgaattcgtttccttcagcatgttagatgcgaggcaacgttactaaacaaggtgaaatcttgcttgattctggtgctactagaaatttggtttaccaagcttgtttagatacactaccaggaaacgttaaacttgttaaaatatttgatgttgaaactaattacacagttactgctgcttttggtgattcttatcaatgttctgaaattgcaactttaaaaatttattttactaatgataaattcattctgtcagacttcattattattcctaattcgaatgaaagaaaattaattattggcagaaaacttttacatcagttgctgttcagactagatgaaaaccatcaatatattacagtgatgggagaagagttggtaattgatgataatttttctgttcgtttatttcaagttgttgttgaaaacaagtttttaattgatgattatgttaaaaaatatcctgatttattttctgataaattaactgttcttccaaaacacaattttaagtacaaggtttgtttagaaggttttgattatcataaaccaaaaccattttacagtaatgctgtgcaatcaaaacatattgagaagtttattcaagatggtattgatgacaatgttttaattcaatctgatgatccaaatgaattagttgctttagctccagtgtttccaattgttcaaaaagataaggttagagtggttactgattttcgtgaaattaatttatgtttaaaatatcaagatgaagcaattccaccgattttggttttaattcaaaatttggcaacttattcctgtttttcaacattggatttaaaaagtgcatactttaatgtaccttcacatgaagacggttctcctattggtattacaaccatttttggtaatttcaaatttcaacgtttaccttttggtttagcctcagctcctgcagtttttactcgttttatgagaagtatcttaatgaatttagattatgataaaaaaacaaagaaagtgcctagttctatttcaaaagatattttacagaagaattttgaactcattcgaaaatcaattattaattctgttggtctacaattgtttgatccttccaaaaaggtttttattattacggatgcttctttaactggtgttggtggtatgattctacaagaacatttgtcaaggaagaataagttggtccctattagtttcttttcaaaaagttttactgttactcaatctaagtacacagttttggaaagagaattattaggaattcttttggctttgtctaacaattatctgttgctttcgaacgagattgttgtttatactgatcatcaagctttggttagtatttctcaaaaacattcgatgttggacaagcgaatcttaaaatttttggaaacattatcaacttatcccgttgttattaaatatttgcccggtaagaaaaatcatgctgattttttgagtcgtttttgtgttgataaacaaccggaattgaatttagacgttttaaataatgaattcaatgctgtaagagtgactagatttgctgctgaattggaaaacccttttagtagaagaaatcaaaagttatttaatggtttggttgatgatgatttgaaaaggatgttaatgttgttgaaatcaaatggtgttttagatagtcgttacaatgaagtgaaaaataattttcaattaatcaatgatgaattaaaatttgtttatgaaaataaaatattttcaattatcaaaattgatgaatgtatgaaattatttgctgagtggcacgctaaattccatggttctccaattgttttgttggatttgttgttagatgaaggtttattttgtccatctgctcagatgttggcaacggcagaagtaaaaaattgcaaacattgtggtttgtttatttcttttaagtctttgcctgcaccagtacaaaaggtgaaaactccacaatttggtgagctatggcacattgattttattggaccactgaaaggtatgagggtacacccaacgaaatatctgaccgtggtacgatatatgttggtttgtgttgaatatgttagcagttattgttttgctgctcctaccaattcaacggaatcggatacggtttgtatggtgttaaattaattatttggttattttccagtacctgggacaattttaagcgataatgcttctaattttgtttcatcggaggtaaaacgttttgctgaagaatttggtattaaatggagattatcaagtgtttatattatcctcaagcaaacagtagagtggaaagagttaatggtttgataaagaaggtgttaaagagtttgaatcctgatatggaaaaatggccattatatgcactacaaacaattaacatttacaataatacaacaactattttcaatactcttcaccttcccaattgatgtttggcttttctacagtcaataaattgaagaattcaaagatgctaacgctggttcaaaaggcaatggaatcaaatcaacaatatttgtttgaaattgatgctgcaatccttcgcaataaacaattacaaaaagtttttgcaaacagagaggtggtttcctctagaagccatgacgcaagatcgagattaaaattgttaaatgatgattaaggaaatcacagtagttatttgttaggtgaatttgcgcttgtgaagaaatttagtaagaagcacaaaacagatccatcttacagaggtccctaaattatagctcaaattaatgacaaaaattcttacaaattaaaagatttacaagatagattgttaaaaccatcttacaatattcaacaactaagaccatgttttcgattttatggatctccatttagatctatttcagattattctcaagagtttggagataaagaaaggaaatgttataggaaagtatttgaaaaggctgctgaagaagattggtcgaagaggggggtatttgtgataccgagatcacaattcaatattagtttagacgcgacttcgcgtctgaaagtttgtcgtccattattaacatgaacgacatttgttatttgttatttgtatttacttatttataggttctattagattttcctaatagaacaagaactttacttttaaacattaatttatattacatagtagatccctactattattatattatgatattaaacatatttgtatcgaaacttagataaaagttatttacataatatttcttagaaatctgctcttggtcgtgggagagaaatttaagaagaaatcatagtatctaatctactttcaattcctaccttatgaagaagatttttgaagtttactttctttcaacatgctgagttttaaatttctgtcggtaatatttttacctctatcatctctaattctcaaattgtttactttgaatgactattcagactttttatatctatgtttctaatattataagctgacatatagtctcaccgtttgattctacaatggaagtactttttgtaactaactccacagttctttgataccagtcatgaggagaatttgtattcctaggattcttgtcaacaaaatatcatctaaactttcagtgataagttttagccaactttcacactctttggtgtggtctttggattatttcttttctttctttatctgcttttttttaatcaactgttcaagctgaacattttccgcagcatctaagttactcatctttgtctttgtaatgtcagctttttggctttaccctataatgaataggcaaactcacaggttaaccttaatgcaacttttaaatggaaatattgtgcttctttagccatatcatttgaaactaaatttggtttaatgtcaatatcaatatcattcttattatttttattgattgattgatttctgattttatcaatcatttcatcacaagcattattcattataacataattaaaaacattattacgtttatcactcaaagatctttcattgatatgttttcttgacttcctataagtttaagcaatgtgagttgtaccaactgtataaattttatttgataaaactttatggaaactataattaataggctttgaattattagccttaatacttttactaacccaaagttgtttaatagatttatatctattagcaagaattataagtttggtaccaaattttatttgaaaaacatcatcataagttttagctaaattttgaagttgaatacaaggtcaatcttcctatctttttgcttttgaaattacaattttaaaaccattaaaatttagaaatggagcataaaccatatttgaattttggttggttttggagttatgaaggaatcaatggttgtagcaaaaatgaaaccaacagataaacatacaagaaatatccatatcatataacctatttgaaacttaagttgatgtatggaatacaaaaaattaattacagcatcatacatgattgggaagcaactcaaagcaaggccaagcgaagaaaagaatactacgagaaagtaataataaaagtacagaataaaagtgtttcttttagtaagtggaaggtttgagtgtagttgtatttgttgttattgttgaggtgtagctaggtgtcagaagaaagaaagaaagaaagaaaggaggaaagaaggtaaaacagtcaaaaaacaaaatgaaaatataagttgctatcactttataagagaagacaattctttttcttggtgcctcacagtaattcaatgggtacctcgtattgcctctcttaatctcctctttttgttttcattgttatttttctttatatatcctctaataagattattatattgtaataaatatgactgtaaataagtaagtgagtaataaattttattactataggcttttagttctgagcaattggttactatacttataactattcgaattatagctgtttttttcaactataagctataaagttaaacggttcaatttttcaagcttgttgttgagatggctaatctaaaacatattttttgagccacagtttgaagagccacggtttcaaaggccgcaaagccacaaagccacaaagatttattttttattactatataaggaagagcatgtattcccacttttattaattgtgtttcctcttcttttctttatattatttattttacttttgtttatgttatttaaataaaattattattataactaatatggattttacaactaggataatcttaattcaacacttgtcaattcagttacaatagtattgaattaattcacataatatattgtatcaatgcctgaatatacttctatgtttcgaaaacaaaatatatgaccaattcatgctcataattcatctaaaaccatttctgcttcaatttaaaatttaaattctaattcgaaagttagtttaaaatcaattatggtagtatagtgacactctctcaactttaaaagaattggcttgtcaatatgatatcaccacaaacggtagaattagtatacccaatgtttagtgtgcttatgcaaaccagcaatattcccattgatatagcaaattcaattttcagtcttggaaatttgttgatttatccttattaaatgatagtaatttggtatctggattatccctaattataataaatggtatacacaaacgtaatattaaaacatttcaagattattatgttttacaaataacggttccaacaaattcaacattattattatcatcttcattgtcatcatcttttttattcaaatttaagaatttcaaagattatacaacttttttaaatacaacaatcgcaaagaagaaattacatcaaagtggtcaatagtttcacaataatccaaatactaaaatagtcctgaagaggatatattagtaagcaaattaaatatttatgctccaatacctaatgatattgacgatatagaaataaatacgaatccaataaatccattatatacaagagaagaaatcttgaaatcttttaaaagagcagatgttgaacggtaacggctctagtatagatatccatagttagttactttaaggttataaaaagaaataataatatataagttataataaagaaaaacaataagtaagttaaagaacagtaaagagtaaatggaaacttctctttatatggacaaatttatgtctaagataattggtgttttgattaataatcaaatgtttcatgtttgtatttgtcatcatatgaggcattagtaatcataagtattactaatatcatatggtctagtcttttctataaatagatgaaacctagatgaaacacatctatttatagtaacaatgaaacatttgtatctcaacaccccaccataagctaaacatcaattaggttcataccagttaatttcacaaatctttgaaatttgattttagataaacctttagtaaacatatcagcaatcatgttttcagtgttaatagaatgaatttcacaatcattatttttaatattatccctaataaaatggtgtctaatgtcaatatgcttggtccgttgatgatgtacaggatgtgatgataacatcttgcaaccttcattgtcttcaaaaataattggtgtttcatagattttcaaaccaatgtgttcaatcaattgttttaaccaaagcaattccttaatagcgtcacccaatgccatatactcggctcccgttgaagacaaagcaacagtttgctgttttgtggatttccatgtgataacagtgttacccaatttaaaattgtaaccagttatagattttctgtcaactttatcacttgcccaatctgagtcacagtacccagccaatttaaaactatttgagtatttaaattctaatcctaaattcaaagttcctttaatgtatcttaatacatgtttagcagcatttatatgatttggatgaggatttttaataaatcttgataaagaggatgcagcataagctaagtcaggtcttacggtgttagcagcaaataatagtttccccaccatggtgcgataccgagaggcctctttttcatgaacacatttaccttcgggaattaaagaagtaccaggtgcaataggaacagtcacagaattacattctgtcataccaaaatcagccaaaaaatttaataaatacctgttgaggtgcatgtacactttttcatcatcttgcataatctccatacccaaaaatgtagaaactcttcccaaatccttcattttaaactttgatgataattcttgtttaacagctttaattgaagcattatcatttgacaaaatcagcaaatcatcaacatagagggcaaccaaaataataacacctgaggaaaccttagaatagacaccaaattcagaaacagctctgttaaaaccataatttaaaagaaccgaattaattttaatattccaacataaaggagattgcttaagtccataaagacttttcttcaaacgacacactttgtcgacagcattttgaacacctggggggataaccatataaatttcttcttcaagatccccatttaaaaatgcagttgtaacatccatttgatggatttttaatttaaattgtgccgcaagggcaaataaaactctaatactttcatatcttacaactggactaaaagtttcaccataatcaattccttgaatttgtctatagccttgtgctacaagacgtgctttatatgtaggtggtgttgttgaatctttaatggtaaacacccatctgcaaccaatagctctacgatgtgctggtagagtacataatttccaagtattattatcaacatgagcttgaagctctttctcaatagcatccgaccaaaatttagaatcagggccacttaaagcttccggcagagaggaaggaatgtagtcagatgttgaagagtcattgatgactttatgtacagcatttaatacatggaatgaagatccagtgtgttgtcttttagcatcaggaccatctgtatcagtaacttctgaaatcgttcttgttaatgagttttcagtactagaagcatcgggaaggatattgataacctccgagtcttcattgaggatattattggatctcataatttcaaaatttgattcaaccatctgaatatcatctagcaaatcaccctgttccagcatatatggcatcattggggcatgaacattatgaaacaaatcatgttcattcatataatcaaagtaatcatcaagttctgtaccagcaagtacagttgtagtttcagtttgcgtttcagatcttccagtaacagatgaaatatcactagcagtttcatttggtacatattcttcgtcttcagcagaatcatattcatccagcatttccatacctgcaagttgtggaccattatcttcatcttgtggggattgattaagtggtctatgactaccaacatctaagttaacattttcattttcatcggcagaaccgataacttcttcatcagcattaatagagtttataacttcctcaatagcaacagttgtatcaatatttgcatcttcattttgagtctcagataatatagagtcaaattcaggaggtgtggaaggtaaaacattggtggactcaaatcgaaggaaggtaggttcacctgagtaatttccagatgagttggtaatatctaatggaagataagccccaccagcagctgcaccggcataaatatcggacggaatttttgtttgatcctcaaccttgtccatatctcttttcttaaggtatggaaagtaatcatcttgaaatttgacattatttgaaataacaatgtcttgtaagtccgggacgtaacatctgtatgccttatgatcaggactgtaacctacaaaaatagcatcaactgttgaagcatcaaaaattgaatttcttttggttttaggaaccaaaacacgacattgaacaccaaagggatgaaaaattgaataatctggagaataatcgttccataattcaaaaggagatttatttttcaaataaggagatggaagacgattgataacaaattcagcagtcttaactgcttctgaccaaaacttaatgggagcaccggctgatgcaattaatgttcttgttttctcttgaatggttctatgtttcctttctgcaacaccgttttgagaggaattgtaagtgttgagatattaatctaaactaggattcgaacccgtgactataagaatcaaaacctttagaagaagaaaccctcaacaagaatttgaaaccctcaccataagaagagaaaccctcgtcaagaagttaaaaccctcaccttgaaaaatgaagtttttcaaagtgaaaatcttattatataaaggaacatgtttcccacttttataattttttatttcctcttattttctttatattatttattttacttttgtttatcttatttaaataacaatacaaactatattttaacttgcttattaaaatggattttgctaatagaattacccttatacaacaggttatgagttcattctctcacttgtgtccaaagtcatctattaatactttgaaatctgctgaaaattatcacaattgggatgttggtgttcgctccattttagctacttttgggtccggtttattggaattttttactgacggtgatttattagtctcaccggatactccggccgatgaccctagtgttgttcaattaacattttatcttaaccgggcccttcaagttgtccttattaataccgttgatggtaacattatttccaattatcaatgtgaaggcttgtctggttctgccttattagcagcaattagaagagattattctagattgtctgctcgtcaactttattcaatggttgacaaattaactaaatcatcctctatgccacttgacaaaggattattatttttaaagaccatgagatctcaatttactcatggcatgactattgatcacctgttaggtcttttatacctacaaatgtttcgtgatccttcggtcaattcaagaattttagatgctgctgatccccaaattagtttatcagctattgaagcatctcttaaggatattgctacctcctcatcttccaatggtgctccttctgctcaagcttttattgctaacaagcctaaatctagaaacagaaaatcaaagacttcaaaagatgttatttgcagaagatgtcaacaatctggtcatatttctccaaattgtactgctgctgttcctatttccactaagccaactaacaatattaataattctgaagtttctactaatgatgttgcttggcatgtttctcaaccaattgttcatgctggtgacacttatactcttgattctggtgctaatcttcatatgactaagaattttgaacattttagtgattatgtttctgctacttctgttgaaactgtttctggtatttctggtgataatttacaaattatgggtagaggcactgtcatttttaatggtaataatggccaaagaatttcaatcagtaatgttgcttatgttccaaatacttccagaaatttgatttccattgaagcaattactaggaaaactggttcaagaatttattttgatgaaggttattgttatatgcaagatggctcagttattggtaagtatttttcaaatactttgtatcaatttattttcttaccaattatctctgaaaattattgtttaattgcaaatactttgaacatgcattccagattgggtcacccatctggtagggttatgagggaattgggttatactccttcctctgatgttaaaatttgtgaacactgttctgctggtaaaatgactaaggttctaccaaaatcatctacttttaaagcaactcatcctcttcaattgattcattcagatgtttgtggtcctattaatgttcctggtttatctggtgaaagatattttttaacaattgttgatgatttttccagatggtgttcaattttacctttggcaaccaaatctgcagcttcttcagttattaaacaattcatcaacttttctgaaactcagttctcatccaaaggttttaaggttagtattattagaactgataatggtactgaattttgcaacaatgatttaaaacattatttacaagataaaggtattactcatcaacttactgttccatacaatttatctcaaaatggtgttgccgaaagaaaacatcgtactgttcaagagaaagcaagaactatcctttctgagtctggtttacaatttaatttttggtctgaagctgttaaaactgctgagtttattatcaatagatatccatctgatgttctcaatggtaaaactgcttacgaattatggatgggcagggttcctaattattcaatttttcattcttttggttgtaaatgcatggtattaattccaaaggaaaagagggaaaacattttttcaccggtctcagttgctggtatttttgttggatatagtccagcacataaagctcacagggtttttattcctaggattcaagatgttgttgtttcaaataatgtcaaatttgatgattcctattttccaatgttagactctaaaaacaatattcctattatggaggacgtttctccttctgatattttctatggtggtaatgctggtggtgttcctgttattccatctggtgcatctaattctgctgaacctcttattattaatcattcaccggttcaatccccagcaccatcttcaccagcaccttcctcctcatccacttcggatgctcattcaactacttcatcatcaccatcatctccagcttcatcatcatcatcatcatcatcatcatcatcatcatctgctccagtatctgcttcttcttcacctatgatgcaatcttctggggttgttccagataatactgaaatggttcctaactctcctagtgttcctgaaactgttgcctctgttccaatttctgatgctattgataatattatttcacaagaagataatgatgtctccaaattttttcctgatgaagacaaattagtttcatctggtgatgaagaagaaattgattctattcctaatgattttgcttatccagtttatgatgaagttcatcaagttcctattgaaccatctttacttccattacgtcgttacagaagtgataccacttcagcatctattactcaacctccactgcaaaagccatgtttcaaaccagaaacacttgcttcatcatctacatcatctactacaccatcatctaccacttcatcaccagcacttgctccagctcaaccatctgctattgttccaatgcaaaggtccttgtctcagctctctgatattgttgattcagttcctaagcgttccaaagcattatttttaggttccaatgccattcatactgctttttctgcatctactactgtttcatctgctttaccaactacttttactcaggctgttaattcacatgacagatccttttggttatctgctatccaaactgaattagatgctcatcaattgaatactacttggtctttggttcctcttcctgttggtcgtcgtgctattggttgtcgctgggttttcactattaaagattcaacatcaccacctacttacaaagctagattagttgctcaaggttttaggcaagtttatggtttagattattttgaaacattttccccagttgtcaggtatgaaagtattagaattgttcttgctatctcagctcaatttgacttaaagatccatcaaatggatgtttcaactgcatttttgaatggtactttgaatgaagaaatttatatgatggttcctgatggtgttgatgctccttctggtatggtttgcaagcttaacaagagtctttatggtttaaaacaagctcctttttgttggaatcaagctatcaatcaagttttattgtctgctgactttcaaaggtgttcaaatgaatatggtatttatactaaggtgttttctggctctattgttattgttgctctttatgttgatgatttattaatttgttcaaataatcctgctgccatttctgatgttaaaggtcttctctcttctcactataagatgaaagatcttggtgttgcttctaggtttcttggtatgaatttacatcaatctgaaggaagtgttggtttatctttaaatcactatctcaatgattatttggttgattttaatatgcaagattgcaatcctgtttctactccatttgctgctggtactgattttttgcctggtgatgctatttctgatgctgatgttacccgttttcgcagcatggtagggaagttattatttgctgctaacacttgtcgtcctgatttgtcctatgctgcttctacattatcaagattcattaaagatccaagagctaatcatattgctgctgctaaacatgtcttaaggtatattaaaggtactgtatcatttggtttggtttataagaaggtatctaattttcaattgattggttttagtgattcagattgggctggtgataagtttgatagaaaatcaattactgggtatgtatttatgatgtctggctgtgctattacttggaagtctaagaaacaacccactactgcattatcatctactgaagctgaatacatggcacttggtgatacagttaaagaactactttggttaattcaattgcttaaaactgttggtcttaaattcaattatccacctacaatttttgaagataatgaaggttgcaagttgcttacaagtcatcctgtccatcatcaaaggacaaagcatattgatatcaaacaccattttattagagagcatttaggtaacaaggttttcaatttggaatcggttagaacagatgaaatggctgctgatatgtttacaaagaatttgaatagaatgaagtttagaaaattcaactgtaagattggtatgactcctatttcacattttggttaagtttagattatggtagggtgttgagatattaatctaaactaggattcgaacccgtgactataagaatcaaaacctttagaagaagaaaccctcaacaagaatttgaaaccctcaccataagaagagaaaccctcgtcaagaagttaaaaccctcaccttgaaaaatgaagtttttcaaagtgaaaatcttattatataaaggaacatgtttcccacttttataattttttatttcctcttattttctttatattatttattttacttttgtttatcttatttaaataacaatacaaactatattttaacttgcttattaaaatggattttgctaatagaattacccttatacaacagtaaggaacagttttctgatggaaaatacctttttcataataaaattcatccataattttgttgcaaaactcagtaccattatcggttctgattttagataccttgtatcctttaccactaaaatgattttcagctgttttaataaaattcataacagcgttgttgcaatctgatttcacttctaatggaacaatctgagtccatctagaaaagtcatcaacaatagttaaaaaatatttttcaagaccaataccggcaaccgaaattggaccacataaatctgcatggagaagttgcaaaggaacagttgatttaggagaataaccagcttttggaaaggtcctagttgacttaccagctgcacaagatgaacattcaatcatatttggagcatcagaaaattccagttgtaacattgtttgaggagatggatgacccagtgcattatgtgcattcaaagttctaaggggtggtctagcgagaaacacagttgcgttttcataccttgtaaccctaggtggaaaatccaaaacatacagataaggatctttcaatgtagcaatttttcttgaaatattgtcagcagaattggtaaacattgcatgatcggagtaaaaagtagaagcacctgttgatgaagccttcttaacagaaattaaattttgcatggcatcaggaacataacaaacatcattcaaagtaatcttgaatgatgtttcaggatcgataaactcgacagtaccaacacctgtaacatttaaatgggtgttagcaattccagtgatggtaccagtgtattcacggaaatgaacaaaatggcgaatatcctttgaaatatgcaaagtggatcctgaatctaaaacatagctttctctagctacttctgtaacatcagttgtattgtagactgaccaaccaactccactgttattattagattcagattttggttttgaatctgaagtatttgacttgcttcttgaagcaggagctggagctaaacaatttcttgcagtatgtcctttcttattacatctgtagcacataattgaagaagaagaaccaacattggatgaagtggttttggaaccacttgcagcataactagttgaaaccgaagataccatatcacgtaacttgttttcaacaacagacaaattaacatcaggatctggagcatccagaatccttgaacaagcctgatcagacttgaacatcattaaataaaataaaccagtaagctcttgaacagtaggagcttgagcacaaatatctcttaaaagagaaaccgcagtttcatcagaagcggatttgttcaaagcagcatcagcagctttcttaaccatatcaaacaattgtctcggagagactttagcataatcacgacggattgcacacaacaaattataaccaaaaagattagaaccttgatattttctcaaaatctttcttgaaacagtgttcatcaaaacagtttggataccattttccaaagctgattgtaacttcaagatattaacatcatctgaagtatcaccatctgggatcaacatatcaccagattcaaagtaattatccataccaacaccttgggctgccaatgtcattttcgtcatattatcccacattggatagttaacagcagaaaccaacttagaggattcgtcctttggacaagctagagcaaagtggcttataacctgttgaacggtaacggctctagtatagatatccatagttagttactttaaggttataaaaagaaataataatatataagttataataaagaaaaacaataagtaagttaaagaacagtaaagagtaaatggaaacttctctttatatggacaaatttatgtctaagataattggtgttttgattaataatcaaatgtttcatgtttgtatttgtcatcatatgaggcattagtaatcataagtattactaatatcatatggtctagtcttttctataaatagatgaaacctagatgaaacacatctatttatagtaacaatgaaacatttgtatctcaacagcagaatatttgggaaagaaatttattaaagatattcatttaagaaatgaacggacgctatcacaggaaataatggagtcacaatttgccgactttttgaaaagaattgattgaaattgaattgccaatgtcaaataatatagatacatagaaggtgataattcagatgcgacagtaggtttatattttgtcatcttgggtgatttagccggtaaagtcaattaattaagaagaacgcctatttatataatttaagaaatcaagttattgaagatttaatagtcaatttggatatatttgaaaataatatacttttaactaacaaatataaaagttttgaaaatattctaaaacttctaaaatagagatgcttattttatacagtacaaccaaaagtttagaattctggccaacagtattacttgatttttgtcagagtttacaaaaggaagaagaatatttaaaaactttaattaagtatgagctctcaaattctaatatattacttaaaaatcaagaacaacaacaagtcttatttaaattcatacaattttccgtggtaacccaattttatcaaaattattagaaaaattcacattaagagtcggacacatgaatatttggaaaacttattgagtgaatctattgctaaaattcaataaaaaaaatagaacctgagtcatatgaggaaagtcatcaaataacatatcttgaatatttgtgaaatagaatttataattcatctaatgatataccatcaaatattaagaaacaatgaaaaattttaagaatgaatgttgaattatcatttgagacaaacatgaaaaataacgggccagatgatgcaaaatttaaagatgtttcataatatcatgttgagattggtaattctaagcgaaactgaataatacataataatattgtattattaagttgaaccttgaaaactgaatacatttaagtattgctcccaaatcagaaaaagaattgtttgtgaaatgttgtaaacagaaaaagaaacgagaacattaatgttataaagcagaaaagtaacgcaagtgaaatgaaacgatagttaacgttggaattataagtataagtagaacgaagaattcctaggtttaatatcgagtctgttgatattttgtataatcttagttatgttatagtttatatagtttgttcttttaatactgttgttgttgtaaaatatggatcctgcccaaagagtcgttagattacaacagtattgatgtaactgaaggtgttaatagacaatcaataactgaaacaaaggtacctactaaacttgcaggcactccatcatacctgaataattcgttttaaaaacaatggctctttgtgatgccacaggtgcaccaaatttgtttttaacagttaccatgaactcagcacttgcaatggaactgggagactctattcctcagtacaatagatctagagaaccggcaaaggatttagctgccggaacattccaacaaactgtccgtggtctcgataaaaatcttcacaagattttagggttggaaattgtatctaggtcatgaatcactgaatttcaaaaacgtgggttaccacatattcgtatggttttgtgctgcccggagttggaatatgtcaatgatcaaggtgataaagttatcaagagatgcatgccagaagatgaggagttgaaaagtctggctgaatcaagaatgatgcatgaatgcagacttgatcgatgtgatactaatggtttagacgcagaaaattgtaaaaaagggggttttccaagaccaaagtgttctggtttcaaaaaaacagctagtggaagaattctaccacctaggggtgaaggtgataaaaatattgtttcatatgatccaattttactgaaaaagtatagatgtcatgtaaatttagattttgctggttcagcagctgttgtaaaatacttgttcaaatacatggccaaaggagctgatactcttggtatgagaagagaacatgttgtggatgatggtacacgaaatacattacctcgtgataaaatcaaagaatttattcgaggtagatatatcagtggaattcagggtgcatagatgctctcaatgctccattttgcgggtattaggccacctatacttgcccttcatgcccacacagaaactgggttttaaaacaagaaactatacaagtttttttaaaaatattgatgaagcggccttgaaaacgccgtttttgtatgaagacatcaacaatatattcagatgggatctaaacaaaaatgaatgggttgcacgtataagaaaatctgatgctttagcttttgttccatctgttttatgtatggtaacatacagagaccagtattatgtctctcttcttttgggagttgtagaaagtccaaaatattttgatgatttcaagtgtggctattaaacttacaaagcggcatgcaatgcaaaaggtcttatagaaaatgatgatgagtatgttcaatgtgttagaaatatcagaggcactcctgcccgttttcgttcgtttgttaatatgttattgatcaataattgtattgttgaacccatccaaatttattactgttgttcattttcatttaacagaagatttatcagataaacatttcgggttttatggcatgcagttaaataaaaataccagtctacaagacatggaggaagaaaatcaaggaagatgttatttattaacagtgtttgcagaattaaatagggatgctccctttttaaacttgcacttcaagaaagaagacgagaggttggtagcacaatttgttgctccatcgttgctatatagcgtgcaagatgaaataaatgagcgggtttctcgtttgacaacaaagcaaaaggaacattatgatactgtttgcaacagagtggctgacagggactctattgataataacctttttttttcttgacgctctagctggcagtgggaaattttttttattgaacgttatgatcaaaagtttgaaaatatttttcccttctctgtacttctataaaattaataccagtaaaaaattacaagaaagaaataaagaacagaatggttactggattataaattcatgataaagagaatttatccagccgccttacgttcgcttactagtaaatgatgatacgaaattagagagtgcgtgtaagaattgtgatttagtttctttgccattcctttgacggagaaaattagtatgttttaatctcctacagtaaattgcaccgccactctaattcagagaaatattgtccgtaattgttcaaccatattttgggatgagataccgatgactccaaactctgtaattttagctgttgatagacttttaagggaagaaaagggaattgatgtttcttttggggggttgtgtacttgtttatgccggtgattttcgtcaatttttacctgttgctaagggtaatcctacattatatgaagtttacagaaaaccatttttatgtctttcatatgcagataagattaagtatcttaaattaagtgaaaatataagaatcatgtactctgtggcactagaagatagagaaagaaggcaagctcaagcaacagctcttttgaagttgggaatgggaccaaaattaccaaatggtaaaggttttgaaaagatgcaagatttaggtgtggttgagtcacagtaatatacgacttcaagaaaatcatattttttaacagatgtttacactacaaatattcttaataatacggggcctcttaataactcacactcttcaaacgatttatgtgaaatgtatgcttcaaggtgtgtgctaattcctaaaaatttggatgttgattaaattaacaaaataatgttgaggagaatcaaaaatgatccctgtctcgttaaatcgtatcaaaaaattattgttggttgttcaaattctttgatggacgttttttccgtttggcaagatagagttgatagtcatagtaaggctggatttcctgaacatatattgaaactaaaattcggttgtccagttgtcttgatacggaatatagatgcagtaagaggtttggttaacggtaccagaatgagtgtattgaatatcagaaatgatgttaatggtatgtggttaaaatgccgcattctgtctggaaaacataaaaataccgaagttgaaattcctatagttattttttatcatccaccttgtgaaatggtcccagtagaatttacccggagacaatttccagtaagagtatgctttttcatgacggctatgaaagcgcaaggtcaaacttccaatagtaagcttggaatttaccttccaaatgatgattttagtcatggtcaactttatgtcccattatctcgttgtacaaatatcgacaatgtcaggttctgtttaaaagggatctgctgtcaagaaacaaaatactgaatgttgtttgtgcagctgttactggaaggttggttgcggaagaatctaaaattgcaaatgaaagtacttactctgtcaactcggagtttgactcgattattttcgaaggaactgttgctgaaatggctaatgtggtcgaggaagatgattataaactatatggatcagttgtttttaatgagacagatgatgatttggaggatgatatagaaggaatatttagctctgaacaccaccctacggtttatgtattatttagttttgcttagaattaccaacctcaacagaaataacaagtttctcttcaaagtctgtataatttggcacattaagcgtcggtgggccaagcgacgcaacactgacgcgaccgcttttttgttgcatatttgttatttaaattgttgcaatctaacgactctttgggcaggatccatagtgttgtgcctataatattaactgataaaattattgtgccgactaacaatggcttttaaaatgaaaatcaaaactaaaatcaaacagccaacataaaatgagttaaattaatttgtgctgattgccaaaatattaatttacacttttgtttgaaacaacttataaaagtgctggcatactgaacttgcagaatggaatgcaccgcaaacggccagctgcaaaatgtattcaggtatataacgagacctttgaaatgtcaagaaggtataagtaaatttttttttaatttaagatactttagtataccttgtatataatgcacaccccgagaagcaccaattttttccaaaaatttgaccaattttcaaactttgactatttataactaaataactacgtatttacaaatgtatagtatcactgtaaatctggaatttaggagactctaaccatagtgtctaggtataattcaatttttaccattgtaaatgtaattgatggtggcttaacaattcaaatttgtcagtaaagttgaaaatctcaaaattttaaactcggactacgtaataaaaataataaaaatatttacagctgcttttctaatgatgatgcaccgcttagttaaattatcataatacccccttctttgtttctttactttgtctccctgatgcccttctttccacaacttaaaccggatatcagtgacaaaacatttatgtgtaaaggcacgttgataaaacttttaaacattgacatggatgcgtgttaagttattgttcatttcaatttatctttgtgttgtatgagggtaattctatttgaaaaatccattgctaatatagataaaatataatttgtattgttatttaaataagataaacaaaagtaaaataaataatataaagaaaagaagaggaaatacaaataataaaagtgggaatacatgttcccttatatagtaatgaaaaataaaactttgaggcattttaattgaggctaagttgagccatttaattgaggcatttaattgaggcttagttgaggcttagaaattatgtttagattaaccatatcaacactttggatttattgaacaactattacttggcaaaatagttttaacattagttagctgttacaatttaacttattcaaccccaatgaaataaagcctttgaactatcacagattgatattgtaaaaatatttcattgataagaaacttattcattgcaacttcaaagcgcaatggctgtctgtaagggaaatgcagaaaatgtttcattgttggcgaacttgctcaatttttttcttacttactgcttaataacataataatatgacaaggaaaagaaaagtttatgctttgttgctgtttgatattgcttatttaatgttacttattagatattctttttttttattttaccaagtcgttgatatacttcaatgccgttatagtgtttattacttgatggtatgattttagctgtattgttacttcgatgttttagttgctattttgcaaaggtattcttactatttttacaagtgtgttctcactacttttacagattttcatcaaaaggaatatccggatagatactgaaactataagttaattaacatctaagacgtattgttgacacttcaatgtatcttctgttgcatttcctctgttaattaagctaccagtccactgtatccctacttataatatgttttttagcgatttaagaaaattttcctgaatcctaagtctatggtttcctcctcaccagtatctcataaatatcacatttgtagccgcgcttttcctctatccaatcatgtacttagtttttgttttgactaagtattggtggagttataaacgtttttagtttgaaatttgcgtttttttgttgagatattaatctaaactaggattcgaacccgtgactataagaatcaaaacctttagaagaagaaaccctcaacaagaatttgaaaccctcaccataagaagagaaaccctcgtcaagaagttaaaaccctcaccttgaaaaatgaagtttttcaaagtgaaaatcttattatataaaggaacatgtttcccacttttataattttttatttcctcttattttctttatattatttattttacttttgtttatcttatttaaataacaatacaaactatattttaacttgcttattaaaatggattttgctaatagaattacccttatacaacatttttaacaaagtccagtaatatgggcattaaccttgagcactttggacatggataattgtaatctcctctcttggttgtaccggaaactttacaaacatattgtttaccgattgtttaggatttgaaaaaaggttgctgaagttagtgattttttttggtcctatttttgagcacttatttttgatttttgaaaaattaggatttaaatcaaaaaatgtggctccacagtgcactaaatatctttcttttctttccaatggtactcttggattttttgtagctgttctattgaaaacataaaactgtaccggagttaattctaaattactatgtaaaaacggtgttaagtaacaacaaaaggtgtgtcgtgatttttggtaaaaaaagcttttttcagattacgtaagattataaatttgtgataagtagggattcgcatatttcccgaagggaaatgtttaactacgcctatatattttattataacctatttgagtgggctgataagtagtcacttccgcactatgtttaagaggaaattgtcaatttagcaacaaagaagaagggtgtcttctgaaaaaagaaagtctttttattagatttctctgctattgcatgttgaattgaggttatcctatttgtaaaatccattgctaatatagataaaatataatttgtattgttatttaaataagataaacaaaagtaaaataaattatataaagaaaataagaggaaatacaaataataaaagtgggaatacatgttcccttatataattatcaaaatgaacatgaaaagcaagtgcttacccctctttgaacaaaacccctccgagcggggtttatttaaagtgtgaccatcttcgggagtaagggatgtgtgaccgtcttcggcaacatggaaatgaacatgcggggtaaagtaccccactttgagtttagattaaccatctcaacaccctaccataatctaaacttaaccaaaatgtgaaataggagtcaaaccaatcttacagttgaattttctaaacttcattctattcaaattctttgtaaacatatcagcagccatttcatctgttctaaccgattccaaattgaaaaccatgttacctaaatgctctctaataaaatggtgtttgatatcaatatgctttgtcctttgatgatggacaggatgacttgtaagcaacttgcaaccttcattatcttcaaaaattgtaggtggataattgaatttaagaccaacagttttaagcaattgaattaaccaaagtagttctttaactgtatcaccaagtgccatgtattcagcttcagtagatgataatgcaacagtaggttgtttcttagatttccaagtaatagcacagccagacatcataaatacatacccagtaattgattttctatcaaacttatcaccagcccaatctgaatcactaaaaccaatcaattgaaaattagataccttcttataaaccaaaccaaatgacacagtacctttaatataccttaagacatgtttagcagcagcaatatgattagctcttggatctttaatgaatcttgataatgtagaagcagcataggacaaatcaggacgacaagtgttagcagcaaataataacttccctaccatgctgcgaaaacgggtaacatcagcatcagaaatagcatcaccaggcaaaaaatcagtaccagcagcaaatggagtagaaacaggattgcaatcttgcatattaaaatcaaccaaataatcattgagatagtgatgtaaagataaaccaacacttccttcagattgatgtaaattcataccaagaaatctagaagcaacaccaagatctttcatcttatagtgagaagagagaagacctttaacatcagaaatagcagcaggattatttgaacaaattaataaatcatcaacataaagagcaacaataacaatagaaccggaaaacaccttagtataaataccatattcatttgaacacctttgaaagtcagcagacaataaaacttgattgatagcttgattccaacaaaaaggagcttgttttaaaccataaagactcttattaagcttgcaaaccataccagaaggagcatcaacaccatcaggaaccatcatataaatttcttcattcaaagtaccatttaaaaatgcagttgaaacatccatttgatggatctttaagtcaaattgagctgagatagcaagaacaattctaatactttcatacctgacaactggggaaaatgtttcaaaataatctaaaccataaacttgcctaaaaccttgagcaactaatctagctttgtaagtaggtggtgatgttgaatctttaatagtgaaaacccagcgacaaccaataacacgacgaccagcaggaagaggaaccaaagaccaagtagtattcaattgatgagcatctaattcagtttggatagcagataaccaaaaggatctgtcatgtgaattaacagcctgagtaaaagtagttggtaaagcagatgaaacagtagtagatgcagaaaaagcagtatgaatggcattggagcctaaaaataatgctttggaacgcttaggaactgaatcaacaatatcagagagctgagacaaggacctttgcattggaacaatagcagatggttgagctggagcaagtgctggtgatgaagtggtagatgatggtgtagtagatgatgtagatgatgaagcaagtgtttctggtttgaaacatggcttttgcagtggtggttgagtaatagatgctgaagtggtatcacttctgtaacgacgtaatggaagtaaagatggttcaataggaacttgatgaacttcatcataaactggataagcaaaatcattaggaatagaatcaatttcttcttcatcaccagatgaaactaatttgtcttcatcaggaaaaaatttggagacatcattatcttcttgtgaaataatattatcaatagcatcagaaattggaacagaggcaacagtttcaggaacactaggagagttaggaaccatttcagtattatctggaacaaccccagaagattgcatcataggtgaagaagaagcagatactggagcagatgatgatgatgatgatgatgatgatgatgataatgaagctggagatgatggtgatgatgaagtagttgaatgagcatccgaagtggatgaggaggaaggtgctggtgaagaaggtgctggggattgaaccggtgaatgattaataataagaggttcagcagaattagaagcaccagatggaataacaggaacaccaccagcattaccaccatagaaaatatctgaaggagaaacgtcctccataacaggaatattgtttttagagtctaacattggaaaataggaatcatcaaatttgacattatttgaaacaacaacatcttgaatcctaggaataaaaaccctataagctttatgtgctggactatatccaacaaaaataccagcaactgagaccggtgaaaaaatgttttccctcttttcctttggaattaataccatgcatttgcaaccaaaagaatgaaaaattgaataattaggaaccctacccatccataattcgtaagcagtcttaccattgagaacatcagatggatatctattgataataaactcagcagttttaacagcttcagaccaaaaattaaattgtaaaccagattcagaaaggagagttcttgctttttcttgaacagtacgatgttttctttcagcaacaccattttgagatgaattgtatggaacagtaagttgatgagtaatacctttatcttgtaaataatgttttaaatcattgttacaaaattcagtaccattatctgttctaataatactaaccttaaaacctttggatgagaactgagtttcagaaaagttgataaattgtttaataactgaagaagcagcagatttggttgccaagggtaaaattgaacaccatctggaaaaatcatcaacaattgttaaaaaatacctttcaccagataaaccaggaacattaataggaccacaaacatctgaatgaatcaattgaagaggatgaattgctttaaaagtagatgattttggaaaaaccttagtcattttaccagcagaacaatgatcacaaattttgaactcagaggaaggagaataacccaattccctcataaccctaccagatggatgacccaatctggaatgcatattcaagttgtttgcaattaaagagtagtttgcaggaataattggtgaaaaaataaattgatataaagtagctggaaaatattcaccaataattgtaccctcttgcatgtaacagtatctatcatcaaaggaaaatctagcgccagtgtttctagtaatcattttgatagaaattaaatttcttgaagtattaggaacataagcaacattgctaattgaaactctttgaccattatgaccattgaaaatgacagtgcctctacccataatttgtaaattatcaccagaaataccagaaacagtttcaacagaagtagctgaaacataatcactaaaatgttcaaagttcttagtcatatgaagattagcaccagaatcaagagtataagtatcaccagcatgaacaattggttgagaaacatgccaagcaacatcattagtagaaccttcagaactattaccattgttagttggcttagtggaaacaggaacagcggcagtacaatttggagaaatatgaccagattgttgacatcttctgcaaataacatcttttgaattctttggttttctgtttctagatttaggcttgttagcaataaaagcttgagcagaaggagcaccattggaagatgaagaggtagcaatatccttgagagatgcttcaatagctgataaactaatttgaggatcagcagcatctaaaattcttgaattaaccgagggatcacgaaacatttgaagatataaaagacctaacaagtgatcaatggtcataccatgagtaaattgagatctcatggtctttaaaaataataatcctttgtcaagtggcatagaggatgatttagttaacttgtcaaccattgaataaagttgacgggcagacaatctagaataatctcttctaattgctgctaataaggcagaaccagacaagccttcacattgataattggaaataatattaccatcaacggtattaataaggacaacttgaagggcccggttaagataaaaagtaagttgaacaacactggggtcatcggccggagtatccggtgaaactaataaatcaccgtcagtaaaaaattccaataaaccggacccaaaggtagctaaaatggagcggacaccaacatcccaattgtgataattttcagcagacttcaaagtgttaatagagctttttggacacaagtgagaaaaggagctcataacctgttgaattgaggttatcctatttgtaaaatccattgctaatatagataaaatataatttgtattgttatttaaataagataaacaaaagtaaaataaattatataaagaaaataagaggaaatacaaataataaaagtgggaatacatgttcccttatataattatcaaaatgaacatgaaaagcaagtgcttacccctctttgaacaaaacccctccgagcggggtttatttaaagtgtgaccatcttcgggagtaagggatgtgtgaccgtcttcggcaacatggaaatgaacatgcggggtaaagtaccccactttgagtttagattaaccatctcaacattgcatgcatcaattattcaacgtctacatatactccggcatcaaacggtgtcgctgagagggtaaacttaactgtcttaaataatgtaagatcgatgttacttagttcgtcgttgccatcctatttctggatagaagttgcaaattattttatattagagaccacgtatggtatggatgatgattcagaagatgaagatcacgaattttatttttcactagaaaactgtaatctgttagatctcgctgctgtaaatgaaaatcaattaaaaggacgtcgaactcatcatgggtgcgtattagactttgaaaataagattattatataaattatacaaaatgacacaaaacgaacacaaatttctactcatgaataagttaaagtcaaggataatggaagataataatgttgggatggttaattaaacatatttttgagccgcagtttgaagagccacggtttaaaaggccgtaaagcctgtaaaaagtcacaaagccacaaagattcattttttattactatataagggagcatgtattcccatttttattatttgtatttcctcttcttcttttcttaatactatttattttactttggcttatcttatttgaacaacaatacaaattatattttaacttacttactaaaatggattttacaaatagaattaccctaataacagttataaccaattcaaataataattcgagtcaaattacctatggcaatagttccaactgtgcaaccagtaactcaaaaagtgagtcaactattaagtctaaggcaacaaaggtagaggacacccatcaacataacctcttgatccaattaaaactggattaagtcaaaagaaggtctgttcttcaaaacacattactacctttgaagagatccaatggaaaattagtcaaaccaaaagtttgctctccaaccaaagaaaaaaatcaagtagcaaaaaattaataaacctaagggcaacaacagaaacattaatttaaggaaaaacggtgaaattagctaaggagtgtggcaataagaagaatatacaagtgaataagaaggatattatcctgctggaaaattacgttttattattaaacaaaccaccaaaccaacttgttttttctaagctaattgcccaaccaacacatgctgttacaaaaccaaaataaataagaaatccactagtaaagaagataaatcagaacactgccttaccaaaagatacctccaaaactcaaaaaaacatgcctgtaagacggcagtgcgcgtctcaatgctaagaatgttaaattgactactcgtattcatccagtattagttaataaaataacaacaggtttaccaataactccaaagaagcaatttctaaaaacttaaaatgctgcagtgaaatctccggattcggaataatggttatctttaattaaaaataaatttgattccaatgaggccacaagatacttggaatgcaaaaccaataattatattattataattactaaagaatccacacaaaatgggtattcaataaaaaacctggcaatattcataaggcacgtttggtagctagatgtgattgtgatgttcaatcaattatcacttattcagaaacatatttaccaacattacgtccagaggtcgccagaaggatacttgctcaagcatgccatttcaaatgtattacaacaaatatgatttcaaaactgcatacccagaaagattatgcacctggaaatttcaaatacactaataaaatttggttataaaaaactggcatgatcgtaagtactaagaacataaaattaatgacagaatcaaaactaataaaatacaattaaccaagaagaatacattgcatctattatagatgaatacaatatcaaatggaatgctaagacagaatcagaactcccgcctggttattattttaatgatcaaatcacaatcattggaatttaaaactcaaaacaacacgcgacttgaaatctacatagactgttaaagaaagactaactaagccagatcatcatggtcgctcatgttccggaagacaaacaagtagctgatattttaactaaattagttacaataaaaattattaatgaattggttccagttgtctttttgattaaattaagataggctgaatcaagagggtgtatgaatatcattagcaggtgaaaaattttctcgacattaatgtcgactttaaactaattattttacagtctctttagatgaatgagactaactagtaatattcagtaaccaaatgtatgttggtttagtccgctgtaactttatttatagccaccggcggtgattctttagttcccagtaaacttcccccgcgcttaataaaaatactggggattcaaaatttttacgggtagttgaaaatgaagttacaacggacttaactaagatacattcgatttttacatattactagttagtctcatttgattaaaaagactgtatatactttgtagttattccttctataacaaagagttaatcacaaactaagttttactatctaccaaccctaattgttacatatgttaatacataagatacagaaaggtccgtatacaaagtccttagaactacgttcacaataagtacaacatttggtacttaaccactgtattgtgagtaataatatgaaaatggtgtttattattatttgtggtcaagtgtactacgatagtatgtttacgcaaggattggcattaaaaatcgacagctttttctaagttatcgatgctataaagtttatgttaccaaaaaggctttaggtacttggcaacctggcagtaccaaaaaggcggttgaggcattagatttaactgattattacgtttcacatatgaagcatgttggcatttatattctctctcccaaatcaccaagaaaaagtgccgttatccttaaaaagaatacgttgtaataaatcttatcacactgtaccatacagtctgaatcattgtttatccaagcagttttttcaaagtataattaatttaaattagcaaatgcagacaaattgaaatccaaaaaaaaaaagttaactcagttgctttgccttcactatagaaacaaacgtcctaaagttgagaagaccgtttaggttgaagaaaacatttggtcggcatataacaaaagttcctgcaaaacacgtgaaacacatagcctgtaatgtctaattgacatctatgctggcaatttttttaaaaccatagatgaggattattatccagcagtgtggttttaaaacaagttgttttagcagccacgttaccaaaaaatattatttcagtttccaaattgaatatggacaccaggctaagaaaagctgagattggtaagtccaagcgagattgaaataattgaggcaagcgtaccttgaatttgtgcacctaaaacatcaggggtaccagaagttaacatcaaatctcctgaagcatagtagacgcctctgcaccaacagtggccaacagtttaccaacatagctttcccaatttggatagtttacagcagcagatagcttaaaagtgctattttatactatgcggggtccattttataacaacagtaaaatttatttaaagaaactaaacaaaatgtacaaacagattaaatacaaaattaactaaagaacgtagaaaaagaaacaattttaaacttttgtttatactacgaattccaatgtttacgaccgtttcttcttctaattgacaacgtttcataaacgtttcaggaaacaaatttatttttaacaagataaaaaagatgattgtattataaacataggggacttgttcatgcatccgaaagtcaggcgacactaaatgttttacttgcgtgagtaaaactaaaggttgagtactggcaaccacgattacaatgttggtgggctaatccatactgatttgcttggtccaatgtataaatattatagtctctgcagaccataaatcaaaagttgttttacttacactcctcaaagtaaaagtaatgtttacaaaaaaagttgttgagattgttgagattggtaattctgagtgagactaaataataaattataatattgtattattaagttgagcctcaaaatttagttgcaaatcagaaaagaaattattagttaacgttggaattcttagtataaataaaacgaagaatttcaaggtttgttaataatgggcgctgcatctagagtaatcaaattacaacaggttatgagtcaaatctcgactctatttccaaaggatagttctgcaaaactaactgctactgtgaactacccaaaatgggaaactatgttggtagaatgttggccacactgttggtgcaagtgttgatgttcattttgcttcgggacatttgatgttaactcctgatactactaacgtcttaagtgcccaaattcaaggtatagtgttgatcagaagaagatattcacatatctctgttagagaactatctaacttagttgattctgctgttgatgccagaacaaaaggtgcttctcctggtgaagcgttagctatttttaagaatgtttgctatcaatttaataatactccggaaattaatcaaatgatgggtttaatctacttgaagatgttcaattcaccattagctaaagcaaaagttttagactgtgctgctcctgatttaactttatcagctgttgaagcagcacttgaagattttagtccatccgttcctcaaacttttatggttaagaataacaaaaatagaggtaaaaagaacttgaaaagaaacccaaatgaagttacatgtcttagatgtcaaactcctggtcactatgctagagattgtactgctcccgttcctgcttctgcatcagcatcgggtgtctctaaacaaggtgcatcagcatttactactacctcaaatggtttttttccctggatggcctccaattctagattacctatatcaagaaaatattagatattggttccaatgttcatattgctgtaaacaaagatcaatttgttgaatttgaagctattagtggtcaaatttctggtattgctgaagattcgttagaagttaaaggaattggtaaacttatattagttcatcctactactggtcatgaaattattttaaatgatgttcattatgttactaatgctactcaaaatattttgtcaattaaaaaagcatctaaacttggtatgtttttatttactgaacatgatgttcaatttcttccatagaattctggggaacgtgttcaaatcagttctactgaaggttcattatattttttagattatcttccagtagctgccaaaacatttgatgttacatctggtaatgttgaattaatgcattccaaattaggtcacccttctccagcaactctaaaatattagggtattctggtggtccatctgttgaaaaatgtgtatcatgtgcagctggcaaaatgacaaaggtttatccaaaagtatctactagtcctccagcaagtgcacctcttcaattaattcatgctgatgtttgtggttcctttccaattaaaggtaataataatgaaaagttcttcttaactatttttgatgattattcaaggtggacccatgttgttccaatccagaagaaatcaaatgttactgaattgatccaatcttttattcaaactgctgaaaacttatttgctgctaagggggatataaagctgcaatcttaagaaccgatattggtggtgaattttgtaatgatgaaatgaatgcttattgtgctgaaaagggaattactcatcaaatgaccgttccttataactcatctcaaaatggtgttgttgaaagaaaacatagaaccatccaagaaaaggtttgcactttgttgttttcatctggtttacctgaaaatttttggtctgaagctgttaaaactgttgaatatttaattaatagatatcctgctgataatcttaagggtcgatctccatttgaaagatggtatgggtacaaaccaaattatgatattattcatccctttggtgctgcttgttatgttttagttccacctgagaaaagaacatctgcattttctcctgtttcagtatctggtattttagttggttttaaatcagttcataaagcatatagatgctttattccctcactaaaagatgtcattatttccaataatgttaagtttaatgataaattgtttccatacaaaagatttgagaatttaccaatacctaataagtttgttgagattggtaagtctaagcgagactgaataatgaatagtaatattatattattaagttgagcctcgaagaaccaattgaattttagtattgctcgcaaatcagaaaagaaattattagtcaacgttggaattcttagtataaataaaacgaagaattccaaggttgttaatatttcttttatgttgttttcttattaattttatatttatttatattttatttagtttatttaactaacaattactgttgtttattatggacgcctcagctagagtaagtagattacaacaaagttaccaccctctggtgttaattttggtgctaaaactggtggtgcagtatttcctttagctgttgatatttcaattatggatacagattcaagttatgttccatctgatgagccgaacactacctccaaatcgattagatggaatacatctcaacttagatcatcaccatccgttacatctgtacattcatcttcaattgaattaactaatgctgattctcaagttaataaatttactgatccagttagtgatgctagaatagcagcaagtgaaatgaatacttctcatcaaacaaatgccaatacttatcaaaacgatgatgatgctatgttaaaagatatgcaagatggtgattcatttattggtgatatatctggtgttccttctaccattccatcagataacgtttcatctgttgctgcttcatctgttgctaattcatttgttgctgctccatctgttgctacttcatctattgctgctccttctgctttaaattttgaacaaggagaaattgatttgggttacattgatgatatttattctgaaattgctgataatcttccaattgatgctgaattacaattagatttggacttgactaaccaacttaccgatgctgaacaatcttcttctccattagttagaacaatctcatctgttactgacaccaaaggaccacctccaaaaagaacttatagagatttaggtgccattttcaaagttctcaaagatgcatctatgccttctggaacaaatacaattcctacaaccttcaatcaagctatgaaatcacctgatgttgacttttggaacaaggcaattgcaaaagaattagacgcacatcctgaaaatcatacatgggatatagttgaacttaccttcacataaacgagcaattggatgtcgctgggtctttaatattaaagacaatattaatgtaccaatgtttaaagctcgtttggttgcccaaggctttagacaagttcaaggtgttgactatggtgaaacttttagtcctctggttagatatgaaagtattagaatcttatttgctattgctgtacaattcaaattggtggtacatcaaatggatgttacaacagcctttcttaatggtgatcttgaagaagaaatttatatgaaggttccaggtggtgttaatgcttcaggaaaatatggtatctcgtctttgtagtctttatggtttgaaacaggctcccctttgtttgaatatgaaaattaacaatgtaatgatgtctgcaggttttaaacggtcattatctgaatttggtttatattccaagattgtcaatgatgaagttattttagttgcactatatgttgatgatttattaattttgactaataatatggccctaattgatcaggttaaattgttgttgaattcaagttttaaaatgaaggatttgggtttggttaatacctttttgggtatgaaaatttcgcatagtttgaatggtatatccctgcatcttaataaatatttaaacaatgcgttataagattttagtatgactggatgtaatgctgtttctagatcacttccttcaaatgttaattctattgatgatggttctaaactttcaggatctgatgctacagtattcggcagcatggtagggaagttgttgtttgctgctagtacagtttgaacagatttatcatatgctgcctcatacttatcaagatttatcaaagaaccatactccaagcatttaagtgcctgcaaacatacattaagatatattaaaggtacaaccaagttgggcttaatattctgtgaaggtaatgagtttgaattagtgggttattgtgatgcagattgggctggtgataaaactgataggaaatcaatgactggttatttgtttaagttaggtaattcaattgttacatggaaatgtaaaaagcaacaaactattgctttatcttcaacagaagctgaatatatggccttatgtgatgcagttaaggaattgctatggattaaacaattgttacattgtctaggtttaaagagtgatactatttcaaagatatatgaagataataaaggttgtaagctgttatctgagcatccagttcatcatcaaagagcaaaacatattgatattagacatcattttattagatatcacattcaaaataaagaagttgaattaagtctattagtaccaattatatgattgctgatatgttaactaaaagtttaaatagggttaaatttaatgaaattgttgagatggctggaatggtgaagatgtgatgatttggtgttgagattgttgagattggtaattctgagtgagactaaataataaattataatattgtattattaagttgagcctcgaagaaccaatcaaaatttagtcgcaaatcagaaaagaaattattagttaacgttggaatccttagtataaataaaacgaagaatttcaaggtttgttaatattacttttatgttgtttttcttatttattttatatttatttatttatttatattttatttagtttatttaaataacttttactgttgttaataatgggcgctgcatctagagtaatcagattacaacaacttcattatagtcaactattctttttttttttacattaatttcattaaaatatacaatttcattcagattgattacttgtacgcattttttattcatgcttcatcaattcaatatatcttcacatactgaacttttttttttttcaagtcaacatctgtattactataaatgattgcagcacctgagttttgcatttgttctctcactacactattagctcaggatcttagcagcttagctacagttgatcggacggtgaacggtgctttctgctaaatatggcttacgtaatcaaatattactaaattatatattatgaattttgctttgttgtcataaaggttgtatagtgtagtggttatcactctcggttttgatccgggcaaccccagttcgaatccgggtacgaccttaattttttgcattatttttttgcacaatcagatatattatttttgtttttagtatctatttttacagtcctctgttgattgaatttcaagtttaaaatattttcataaaaaataaaatatatctgcttacgtaatactgaaagtttgcacatgatctaaaaagaggctaaaagtataaaaagtgtcagtttgtccgagtggttaaggagaaagacttgaaatcttttgggctctgcccgcacaggttcgaatcctgtagctgacgttaattttttgcttttattttagttatttgtttttatttttttgggggtttgtattagaatttgccttaagtttagagaaggtaacctattctatcggattattttaattgttatttatttctgtatattttttttttacaattgaacctacaacaattatagtgcaaagatggcttttctatttaagagaaaccctaaaaccccaggtgacttagtcaaaattttgaatgaacaagtgactaaattagatcagtctaatggatctgaaaagaagaaagcccaagatgaagctacaaggcatttgataacattaaagtccattttgaatggcgatgatagtatttttggtgaatcagcaataacatcgcaacctgaaattcttaatcaattgagccaagagatttattcttgtgatatattatcagtgttgataactaatttagctgatatagaatttgactcaagaaaaatcgtggttttattgtttaactccttacttaaacgaaaatctggaaataggtcgccaactgttgattatttagtcaataatcccaagataataacactgttgatgcgaggtccggaattaccagaagtttcattgaattatggaattatgttacgtgaagctcttaaacatgaagtcattgccaaaattgttatatacgatccattgttttggaagtactttacatatgttaatacggatatttttgaaatatcaactgattcatttgccactctcaaggattcattgacaattcatgaaaagttagttggtgcttttttctctaatgatgccataattgatagattcatcacatcaattaatcaccttatgacagcgggaaattatgttaccaagagagaatctacaaaattgttagcagatttaataatgataaaagcaaattataaaatgatgtcaagctacgtgaacaatgttgaaaatttaaagattattatgttactcttaggagatagatcaaagaatatccaaattgaaggttttaatgtattcaaagtttttgtggcaaatccaaggaaggaaaagtcagtcattgatattttgaccaaaaatagaattagattgctagagtttttagaaactttcaataaggaaagaaacgatgatctctttattgctgaaaaagagtatattatccaacaaattcatcttcttcctaaaattgtcatgaatgaaaagtcaggcgaaattaaagaatcaaacctgaatggtaaaataattaacgaatttgactgattgaaatataagtttcactaaattatatataccccataagatccctcatactttatatacttaatatagaatattgtgtattaaaatagaatcgctaattcctatattccacttatttcaaaataagagaccatctaattctttatatctttcagagtgatcattttctgaagtactaaacattttaaagtttgaaatatcaacgatattaggttggattgcttttgcgttttcggtcggcatcaaatttgattcaacagtcacttcactttcatctactataattttatttggccaatatgtataaccaaagttgtttttatcaattagaagttgtccttcattaacaaagttattcaatatagtttccaaaatgagaaaatttatgtcaaattcttcattttgtaattgtaaagcagataatccaggatttgatattatatagttgaaaattttagttttgacactaacatcattattacttttggagacaacataaatggatttagtgtttgaagaatcacctatatcttttcctcctaattgcaatacttcgatcttttcacatttcatgttgagatttagcttatcaaattgagaaactgcatcataaagctcttcagctgatattaaatttatttgtcttgatttattatagagaaataataattcgtataatgttattaaaccttttttcttatctaaaatattttcatcagttaaaaaatcacatatgtctctacttaattcattaatatacactaaggaaaattttgatttagtttgttctgatttttctttttttaaactattcaaggcatttgtcattttgtttcttcgtatagacttttcaatttgtttattattcaaaagttgtccaattttcactacagaatttcttgaattttgaagtagctgattatttctatcatatgctaatgtcgttttgtttttatcagcaagtaccttttgatatttactggacatagcaattatttttttagccatagacatcaattggtctaagtcttggacagattgttccaacaatgaagaaagctcatgtgattgttctactgatttgtttgttaacccatgtatcccgttagaaagagaaacaactttgttatttccatcaacatttatgtagctttctttttccttctttaacgttttatgtaatttatcgttttggtcatttttcttaatacttttttttgctaaatatgaatgaactatatctgatattttatcgtaaagtaatctgtgccctcctttacgaaaggatagttttatgatactcaaatcaatagattcatatgattcagtagttttgagtttcaccttagctgtgtcttcacttttatcataaggatgtatcaaaaatgaattattagtcaatttagtaccacagatttcacattctagcatcgatggatgattgacgaatgtacaactaggacatattgatgcatcaaatgaaacaagatcaaaatcagtatttccattcgttttactttcctccttgataattttttcaatttgatcgtaatgtgactgaataccacaattattacatattggtagatcagtttctatactatccaatagaacagaggagctattagagtaggagcaaattggacaagcccaagatatatttttcttctgtttctttggagaattttgaacttctttagcagaatttatattaacttcagattgattggataaattcaaagttatttttggacttgatttcagaaatccattgtaaagatctatatcttgtatttccttcaattgtattgctaaatttaagtttttcttaatatcattgacaaataccaatcttttattagttaaatatattctccctttttgaagatcctctactttataactatcttgataaacaccaacatcattcaccatcaaaatatcatattcatttggttttaatattggtcttccacttggggaaagtgagatttgtctccaatagctcgactgaaattccttcatataataaagagcataaaattagggttttttcaagtttattttcaatgataaaataagtctagaagttgttctaagcgtagaatcttaataatctagaaagtgtagtattatcatcaattaatagagtgaattatagttgtcttaagatcataaatggttataatgcggcggtgcatatgataactttttttgcttagatgtggcgagtgaacctattttcagttacttttattattattattattattattattacattgaaacttaagatataaatatatatataatagatacaaaattatgatatagatacagatatcagatatattgaactattctactaatgagtggaaaagaataaacatttttgttaattcctttagtccttcaacattatagttgccaacttcattcttcaattcttcatatactacctctctcttcaagacaccagctattaagttactgaagtgtaccttgatggtttcagcttgtaaattacactacagaattttgagatcctgaagaaatgatgatactatttatcaattggaaaacaggaattaatatctcataatatgatattacttcttgtgtagtatcattgtcatttattttcagcggattgtcaagtgatattttcatagtaacaaacgctgatgatccattcaagtgttcttgaagtttcaattcaaatcctaaatctgcatctaattgtaaaaatttacattcttgaatagttttgaaaatatcatttcttattaacatttgagcaccatatctaatttgagcaattcttgttaataaactgataattgatttaaaatatgttagttcatatgtcagttcataaaatgttattccagaatttccagtatttgggtttaatgcacgacaaaagctagcatcaacaactttgaatttttgaattaatagtgagaaataattacccttgaacaatgtttcgaataaaagattctcttgaaagtttgaaccattgaaagaatcagtaagtttgataatattttctaacaatagtaatgaagtaatacgactcgatccatcaccaaccaaagtatcatggcaaataacatcaaaagtttttgaatctaactgatttcaaaaatacaactaaatctgtaatgttccttgtattatgtgatatattttcaacaatattactaccaataatgtaaagatcagatcttaaatttgaagttgaaaatggtagtataattctttgcatagcaactttgaaaagagggaacaaacgattgtaatcaaacaaagatcttgcttcaatttcacttttattagtgtataaaatacttttatctgcactataaacagatagcaaatgaacacataaggatgataataattcagcaaatgttacatcataatccatatattcatcaagtttaggagtaatacattgaaatacttccacaataaaatcagatcgaacacttattttcatatcaagttcagcaaccaaaactctgaccaacaatgtccatgaagataaatatttgtacatattaaatttgaatgtatcatatgaagctgaacaaataataatttttttcaatttggcactttccattgcaataatacgtccattttctttaacatcaaaacttttctttgaactctttgcatataatgcaaccaatttatctataatacttaaatcataatgcgaattattagtttcagttgttacatctattgattttattcttttgaaaatatattcagtaatcaaatgacgcaaatgtgttatcaattggttcaatcatattatatgccttgaaattgagaatatctaaatagtttaaaacctttgaggatgcagagacaaagcttgagagatgggttaatgtttccagatatgctcttttaagtgataatgtaccattaattgaagatacatgaatttcaacagcaattaattcaagtaaattatgtctgtaaaatatgaaattattaaatgtagatattgcttcaccttctgagcagaacttgttttcaactttgaaagtaccatcaaatttcataccagaaaataaactgttaacaggtaatttttttgtattctccaataagaataaaataaggttattgttagaatttaatggagataattcagaaccatcagtacgaatatattgtaaaatctttctaccagtcatatcagatttgcataatttcacaattatttctaaacataaactgcaaactttcacaaaggtgtaagtgaaattagaaacatcattaattgataccagagttgttttaagaatgttaacaattgacctaaataaagatttattggatgctatagttgtttcaacatctggagaaccaaagttaatttttttggtatcaaaacctaaaagaaaatgagctattgtaggttgtttatcatcaattgaaagatttaggtttaagaagtttaagattcgcaaatttaatagatagatattcctgactataatttggattttcaatttgattaataaattgtgaccttatacggatagtttcatcaattgtttcacagaggacaagtaatttgtttttcttgattaaatttgaatgaacacctatttgtaaattattgaattcttttgaagttgataattttttcaaaatggataatgatttttcagcaacttgtaattgtgttgaaccaacatataaagaaaaattagcaacaacaggtaaatttaaaataaaactttcagaaaatctgtgtaaaccagataaagcaactgtagttggatcaacgtagttattatcaggtaatcttaaaattggaattagttcatctgtaaagaaactttcaaacaataatgcattatcaataagctttaatgattcctctaaagttttcgtaacaattgaaatttctgataattctgataatctatcaattcctaaattagatatattgaatagagaatcataaactttattatcatataaaacattcaacacagcagaaccttgatgtgattgcaaatatgtgatgatattattattagcagtgacagaatctatatttttaatacgacaagcagcagcatttaaaacaatatccggatcaagttgattcaaacaaactattcattaactttaagatggaaaatttcaataatgtcttttcattatctgaagcatcaagataatcaacttctgggaaaactttaccacaaatataattaatataacaccaaacacctggtcttctaaccattgaacctaattcttgaggaaatgaatgttttaaagattgtgatatattagttgaggaatctaatggagttaacagtttggtaattaaatcgacaaatccgaaaattgaatgataatcagctaattttttagaaaagttttcattagtgaaatttatgaatgaattatttttattattatagaaaaaacaattatcaatagcttgccaaaatcttaaatctttcttgttcagaatcacctagtaacgaagttaataatgccattatagaagccatttaatgaagtattagaattcaaaagatttatgagaattgtaaataattgattattatcactatcaagtaactcaacttttgcctttgtactatttttggaaacttgagaaataacttgaaagaaaccagagatataaataattgaatcttcacctaattctgttacaatttttttattagatgaattatttgaatcaactaaattacctaatactgaattttccaaaactttaggaaagtgcatcattataatacgataatgttgaataaattgttgaccaactgattgatgaatatttagtaagtaaagttgaattttctcttggattagttaatacatttggattacttgaatttgtcatttgtaaaaatgtgaaaacattaatcgaattactttcacctgttgctaaactagctaaaaccattgcaaaagttgacattattaagggagaattacaacgggatgcccattgtaaaaatccataaagggaagatgaagtatctgaccaaatttcagttgcatattgtggtctttcactataaagataataaattgacatatagaaacgttctaaatctgcattttcagttaattcttctaaattgaaatcctctgatgaaagtaataaatcttcttcagtatctcttaattgtgacatgaaaaatgctgcatttgaaataaaagaatgaataaaagtagataaaattggaactaagaaatccacaaaatgttcattaaatgtaatttgatcatctattttataaattgtaacagcatcagtttcaattgattcagaacctaataatttttgtcgttgtaaagaacttttagctctagatgttgcctcttcatcaatatcaaataatctaataggtaaagattttggaatatgttgttgtaaaaatgatctaaaatcataaaatggtttaattgaatgatctaaagttgattcaattaatgaaatatctgcacaaattgataataattgttctaatgcaccagctgatacaaatttttgcattggatcatcaactgaaacagtaaaatcaaatttattttttctatctttactttttttacaccaatcaataaaattagttgtaaaaacaagtaatatcaatgctttaattggacattcagctaatttatcaatattattaacactatcaattactaatttttgaagtttttcaacatcattatcattaattttatcaagatttgagacataagtgaaaagtccaggaatataacataacgaaaaattatcagtcggatcaaatgatgtaatatgatttaaaattgatgtaaaattatccaatgtaaaatgatttgatttaaatcctgaatatatataacctaataaaatttcaccaacaatttgatattgtttgaataagttgatttcttctaaatctaatatttttcataaaaggtgcatgttcatgaaaagtacctaaaactttacttctttcaacagattgtttaattaattctaattctttttcaatagctttgaatgattctaggatatgagttatggagaagtttttaatttgaaagattttatcttttaggtaagtttttccattattttgattagatgaatcattgaaaatagaaatttcagttgatgaagaagaagtaagattttcattttgattagattttgaaatattaattgaatttgaaaaacataaataataagaaacaatttgtaaaatataatctcttcttgaataataagctgcaattgcagaatctaaatatgaagtacctaaatttttcaattcattttgagttgcattataaaatatttcagctgcaattaattcatcaatatttaataaatcagataaattaataacattttcaataaaagtttgattaacttgaaatgatgaaccatcagataatgttacattaccagattctaatgatttcctactagtttcagatttttgtttaacaattaacagagaaatcaaatcatcagataattcctcagttaatgattgaattaattcatcattttttgatgataatgcattgtataaagcctgaaacggcagagtagaccaattatacgccatcccctactactatcaacagttttaactatattaaattgtatttcaagaagaagtcctactatataaacaaccactctctctttttacaaattttataattttcctttttgacatgaatttggaaatttggaaatttggaaatttttattattttgtattacatcagcaattcaatatgtgataggtaacacttactgcttctttaagaagatatacatagagatagacataaataatgactgaagataatacgtacaatataccgttgtttcaaataactgataaatccttattggaacaatggaaatcacctgaaaaacggatattttcaagcattgatataccatcatttaaaaaatccaaggcaattgaaaatataaatggtataataacattaatttgttcaaatatatcattaaaaaatgttcctaagggggcattggatgataaattagtttatttcgaaaaaaattcatttgaaaaaccaactgaaattagtgggaggaagaaaccacctgtttttgatagtgataatgatggggatgagaaggatattaaagaagaatattctcctataactgtaagtatattaaacattctcaatgaatttcaaatgttaaaagatgatacaccaccatttgcaggtccaagaaggtatggtaatttagcctgtcgtaattggcatgataaaataactgataaaattgatgatattttaaataatgaattaaaatgctatttctacaatgataacgaatactgatattgatgttataaaggaaaattttgaaggatttaagaaggaaatcaaatactatttattaggatcatttggttcaagagagagattagattatggtacagggcatgaattatcatttattgcatttttaggatgttttataatgattaatttaatcaatagacatgaatttaatggtaatgaatggcttataatattatctaaatattatgattttgttaaatcattaatattaacatatacattagagcctgcaggatcacatggagtttgggggttagatgatcatttccatttaatttatgtatttggtgcatgtcaattaatagattttaataaattaggaaatgatgaaaaaataattgatccaagggataattattcagtattaaattttcgaatgaatttaagtccatcatcaattttaaatactgaaacattaagggaacaaagaactaaaaatttatattataatgcaatatcatttattagaatggttaaaaagggaccatttaaggaacattcaccaatattatttgatgttgcatcaactaaaaattgggaaaaagttgttaaggggatgttaaaaatgtattatggagaagttttatcaaaattcccagttgttcaacatttttattttggtggagtattttatccatggattgattgtcaaaataattcaatattaccatctactgaaggtgaaaatttaaatgatgataatatgatgattgaaaaagagtaatagtggtagttatagtaataggatatcaaaatgaagttaattcaacaatgagtggatcatttagtaaacgagaaactgatttgaataaattaataggtaatcgttcaaatagaggctgggaataatgatagatttactgaagttacaaccaaagctccatggagtaggtagtgatgattattaataatataaattaggaaaagaatgttattattatacatgcacacacgatgtatttaattctatgtaaaataaataaatatactgacattaaacttaagcggaaccagttccgaaagctttatcgaattcagtaaagacaaatctatatctaacatcaccatcccaagctctagttaaggcagtttcacaaccttcttcatgaaattggaatagtttcaacccaaggaacaatattattttcagcagctaaattaaataattcaactgcttcctctcttgaacctaaagctgaagaacataaacaagaaccattaccaaagaaagtaaatggtgaaacattatatttttcatcagctgcaggtaaaccaactgaacaaaatctaccttcaacttttaaaattgataagaaagcatcaatatttaaacctgataaaccaattgcacaatttaagattaaatcgaattgatcaaaatattctttttcccaaccatcaataccagttgcaatgaaaccttttgcacctaattcaaaagattgagctttctttgaatcagttcttgagaaaacataagcatcagcacctaaagctttacaaaattgaacagctaaatgacctaaaccacctaaaccaacaattgcaacttttggaatttcattatttggtaaattttttggtatatatctctttaatggagagaaaactgttaaaccagcacaacataatgaagcagcatgaattgaattgtaatttttcaggaattgggaaacacatatattcatgagcacgtacatgagatgcataaccaccttgagagatataaccatcaggatatttaccatcataagttgtaacaccatttgcacaatattgttcattaccattatgacatctattacaatttaaacaagcaaaagcttgagcacctaaaccaactctatcacctaatttatgtaaagtaactttagaaccaattttaacaactttaccaataatttcatgaccaacaacttgaggtaaagtaattgaaccccaaccatgatcaccaccctttgcagtcattatatcagaaccacaaagaccacaacattcaatttcaatatcaatatcattttcaccaaaagttttaggtttataagtaatatattttggtttattccaatcttttgtatcagtaattgcaaaacctgcaaattcttctgggtaattaactttagccattattgtttatcgaaggaaggaaagaaaggaaagaaagagtataaattcaaaaaaagttattaatattatgtattcttttgggaaataaatcacattttataagaatctgtgataataagcttaatgaataataaataagtttaaaacattttgaacttaaaagggtaataaattgcgatttctcaatgaaataataaattcacaataaaatttctttcaaactattgataaatagattagcggatagttaatactgaattgggtaatcagatccactggtgaattttaattttgacagatttgaatattagaatggcattgcttatgtaataaatatgcttatgtaatactgcattacgtaaccaaaacaagtctatgacatcatcatacgtaatacaatagactagactacaattaaaactaattgatcataatgacgtaaactataccccatctaattaccccatttttttcaaatgtacactatattatattaccaaaccctttatcacagtttcgtaataaattgcacatttacgcattctccacatctccataattcccctcccccggtcattgtcggacatttatacaattaatccattacaccgtccacccccatcatccattatcggacatcggagaaattagagtgggcgggctgagctaacttttctccttttttctcctttttcttttttttcaattatataatcatttgtccgtcaatttagcgctattacgtaatagatgtgaaaaatggggggacgagtaagtaaattttatagtgttaacatgcataataaaagttaaaaatagaatacgtaatgcatagcaattatgacattttcattattatttttattttattaaactttttatgcatcaaattcttcattttgtgatcatttgtgtttatttaaatgaaccctcttcccccacttttttgtaaaaatattttcttcctggtttttatctttttctctttactgctttgttctgtttctttaaacatcaacaaagaaaatttataacaaagataaatttctgttatactctatactttaaatttttattataaatactccactacaaatctttattttagaaattagaaatcttatttaatttattcacttgcaaaactaacttatattatattatactatctataaacaatcatgtcttcaaacgaatcaaatagttcagtctttgatgacaataaacttgatgatgaacaaaatcaaaatcaaaatcaaaatcaaaatcaaaatcaatcacctttaaaaaatgaaaaatttgatcaagatgtaactaaactgagacatattaactgatgatgaatttaaattaactaaatattcaatgtcttcaaaaatttcaacttttggtttaaagggtaaagcacttagttacctgattacttcctcttgtgtcattggtttctctcttttcggttatgatcaaggtttaatggcaggtattattactgctcctcaattcgttgaaactttccctgctgttggtggtgaatctcatcatgcaaccgttattcaaggtgctgttacttcttgttatgaacttggttgtttctttggtgctttagctgcaatgtatttaggtgataaatatggtagaaaacctttaattattacaggtgcaattattatcattattggtacttttatctctattttcccatttaagaatcattgggctttaggtcattttgtcattgctagagttgttaccggtattggtaatgggtttaatactgctacaattccaatttatcaagctgaattatcagatccaaaatatagaggtagattggttaacttagaaggttcatttgtcgctgttggtactttaattgcttattggattgattttggtttatcttatgcaagtggttcagtttcttggagattaccaatttctttacaaattgtctttgctggttatgttttaattacaattattggattacctgaatctccaagataccttatttcaaaaaataaaattgatgaagctcgttatatcttatctcaagttaatgattgttcaattaatgatgaatctttaattgaagaagttattttagttaaagatgctaataatagatttgaaaagcaaatctcaattagagaattatttaaaccttctaaacatcaatatttaaagagaatgattattggttcatcaggtcaattctttcaacaatttactggttgtaatgctgctatttattattcaactgtccttttcgaaacaactgtcggtttagatagaagattatcacttgttcttggtggtgtttttcgcaactgtttacgcattattcacaattccttcattcttccttgttgatagattaggtagaagaccattattcttaattggtgcttcaggtcaaggtattgctttccttattgctttcggttgtttaactcatgataataaaaataatgctaaaggtgcagcttttggtttattcttatttattgcattctttgcctttactattttaccaatgccatgggtttatccacctgaaattaattcaatgagaactagaacaatgggtgcatcagtttcaacttgtactaattggttatcaaatttcgcagttgttatgtttacaccaattttcattaatcaatctaaatggggttgttatttattctttgcattgattaattttatttatattccagttatttatttctattatccagaaactgctggtagatcattagaagaaattgatattatctttgctaaagctcatgttgaaaataaagcagcttataaagttgctcaagaattaccaaaattatcaacaaaggaaattgaagaagaaggtattaaattaggtttatatgaagaagaagaagaatttattcatgaatcaaatagcattatgacccatcgttcaaatgttgttgctgctggtaacaataataatgaattcgatgtttaatcaatttaatgatttatgtctcttattattcattccctcttttaatgaccccatttttatgtttttaatttatctatctaatgtgcattttatatatattctatctgtttaaattttaattaatctatactaaataaaaaaattattaatttattattacaaattattatttattatgaatcacgtcacattacattaaagttgaacgcactccaacttctttgctaccttctccatctttcatctcacctggccttttactactttcaaattgtgcataaatattcgttaatttttcaagttccttagcagaaatagatctcttggtttcctctaatgattcctttaactgagataatgtaatataaataacttttttatgattagaaacaatattttctttcacattaacttcagtattttgatcattcacctctctagaaatattactaataatagtttcaatcttcttcttaacttgctccgtattactatactttctttgatcagtgattgataatttttctttaaatttaaaatcgatatctctatttctattactttcattatcattatttaaattatttgaagtttcatctaaacttttatgaacaccctttcaaatatgcattatatacaactgcctgtaaatctgcacctgtataaccagaagttaattttgcaatttcaattaattcatcaccagatttctctaatttaaatccattactttgaacaacagttttcaaaatatcatacctattttcataatcaggtaaatcacaaataacacttttatcctaatctaccaggtcttaataatgcagaatcaattaaatcaggtctactagttgcagctaaaacatagacaccttctaatccctctgcaccatccatttgtgtcaataattgattaacaattctatcagttacaccagtagaatcatgacctctctttggtgcaattgaatcaaattcatcaaagaataaaatacatggttttgcactctgtgctctctcaaataattctctaatagattgttcacttgcaccaatatatttatttaaaatttcaggacctttaacagaaataaaattaagtccacattgtgatgaaattgcacttgcaagcatagttttaccacatccgggatatccataaagtaaaatacctgatcttaatcttaatgaacatttctcaaaaattggtgcatattttgttggccattctaatgtttctaataaaattcttttaacttcaattaatcctccaatatcttcccaattagttgtagatttttgaagtttaacacctcttaatgatgttggtgtataaccttcaattgcagaaacaaaatttgaatattgtaaactttccatattttcagaaatcatattatgaaatgctctatcaattaaatttttcaaatcaactggtaaataaccatctaaatcacttgtgatatcaattaattgattgaaaagtttatcatttgagtatttgctaaaatttttcattattaaacttttcaaaatttcaacaagttgatatttatttggtgcctctaaattaatttcttcattaacaaaatgtctttggaaaattatttgattaattgaatcctttgatttagatgttactaaaatattaatttttttagatttaagttgattttcaaatgttttaattaaaagttctgttaattgatgactatctccactatcaccatgttcaacttccttagttaagatgaaatcaagattttctaatattaataatgatggtgaatgccatacactttgtttaatcagcttaacaaataaatctgagaagtatttagatttactgttgttggttagtttatcctctgaaacatcagacccagttgcattgttttcatcttcaccttcttcatcttcatctcgataaaagtatggtagatattcagaatcttgatctgtaaatttacccttcatagttccaactttaccaaaatcaactattttaacataatatccattatcataaaattcctgtgctaaaaacttacaaattgctgatttaccacttcctgattttccataaagaagtgtggaaacattatcgtaaagactatttcttaacaaatctaattttttgtcttgaccatgaacttcaatatctgtgtttggaaattgttgttgttgaattcttgatctcggaactaaaagatctttaccaatctttaaagatatactatttgcaagatttttctttgtgtcagcatcatcaacatttgaattagtttcatcgcttaattttagcagtgtccaagtgcatagtgacctctttctataaatttcattggctttggaatctttaatatgtaattctaatattgcaccttcaggtaaaattttcggtataacaggtaatctcataccgtttgttaaaggtgtgatctcaccatacatttcaatcaatccagttctcaaaacttcaataatctgtttattcttttcatttttcaatgattttctccctaatagagaaccatttttcaattcaattttagaatcttcatttaaagttggagcattctcgtcggatgttgctaactttctaatattaattgtacaattttcaatgccaaggcgaacacttcttctactgtatggttcaacacataatagttcaccgcatgtttgatctaatcctaaactagtagctaataatggggatataaaaaaagattcttgtttaacaacggataaatcaaactcattgttattatcttcaactgattcttcaatataacgagcaataataacattcccaaaagttccctctggtacaccaatttggttctccttcgttgttacttttttagaataacttggggttcctggaccttctattacttgtatctgtacaaattcacagttttcaaacataggtaattttggacctctattatagatacacattccacttcctttttttaaaactactgatcttttgataatgttcagttgtcttgagtttgattctttactattcatatttttcctcttgggtgaattctctgctggaacattcgtttgtttagtctctgctaaattattattatgaggttttggaataatatgtaattcagtatcatttccaatttttgcaaaatcaacttcctttgttggagtttttattttgataactttaaacgttattgcgcttgaacttgttgaatttggatgtgcatgaattattaataaatgatctttttgaacacatcttacttgtgataaaaatgtagattcaattgcctgtgcgtgaatttctgtaagttcccaatcgactgtagttaatggttcaatttcaacagatgatgcaattgattgtggattatttgcatgtgttaaatccaattcaactgtaattttagttcctttcttaatatttaataatttagcatattgggaatcaatttcaatagattttaaatcatttgttgtattaccattccaacctactgacgcaattcttttcccagttttaaaattgttgagatgcaaaacaacctgttgcactagtagattagtggaatctaagatggggtagatgaaagttgatggtaaagatattaaacagctattgaaattcttcactgccacattgacatctatacttaatgacatcttcaatggatggataaagtgaaattgaaataatgtattttaagtgaaattatgaatgtagaaccaaaaattgcacattttattgataatggttctttatcgtgttcatccaacttcagtaaatcataaacatgaaaaaataaaaaagtacaagaaaaatagtggttaaactccttatcaggggctcgaaccctggacatttcggtcgacttcttaaagaattcttaaaagccgaacgctctaccgactgagctaacaaggaatttgtgtttaagtaaacgaaaatatgtaagatagtggataatactttattacgtaatggaagtaataagtatcaaataaattcgtttgttggatctttagtttgtgtacaacaagcgagatatcaatgagacagttggtattaattagtagattcttctctaaccaatactctgattaatgtcccctctccgaagagagttataccaagttatacaggatatcatacttatttatattacaatattaaccattccctaatataattaattaaaccattccttatcaatcataccactccttatctattgaagtattccttatcgtaattaattagaccattcccaaaagtatccttgtcaaaacctgtcaaaagtaattaactaatttatgctaattcattcttatcatttccttataactccgaacctccgaataaccgaatatatcaattctcatcttattatttacgtaatcagcttacctaattctcacgtggatattattgaacaacttgtatttattcccttacagtttaggtgtttccaaatttaatacccatcattgcttttgcacgtgactatttttatttgggcttatatcttatgattgaaagattagttgaggttgaaattttgctcagtcacctaaaccactataaaaaacattctaatttataaaaaatctttttttaagatataaaatgaaatgtttaggactcagtaaaaaattgaaatttggtgaattttagtatgactaagatggtattaattttctttcaagccaatttttacagaaactagtattattttatttatttatttagattttatataatactcttgaatttgtactttcttctttttaacaattatggttaacttattagaaatcatgtattggatttttttaggctgcaatagttttacttttgataaactcagtatttgacctatattgatgtaagaaataaaagaaatgcttgattataccaaaacaacatctacgaaaatattatatacagctatttttatgaaattaaactaggattatttataaaaaagaacaaattatctctttgcaagtatgaagttaagtgatcaagtgcaaaacatcaatttaattccagataatatatcttatattctactagaaattttttagtgctaaaaagttaaaaataaggaacatagaagcaaaactattttggcaagaaaacacagtagacagacaccaatagaaaccataattttttccattatatttatgagataatcacttaaaaacatagccaagcgccatcttttattataaatactttttaatgcaaaaatgcacttctgtgccttgtaggtagaactattaagagacagatagactttatggcctgttaactagcataatttcataccaaaactagttattttgctagtatacctactaaatattaaatcataattttgaaaagggactcaaaattgacatcactgtctaatgaacctatataaaaacgtcttaatgccagtttcacagttaaacatttagcttacgtaagcacacaaaaaatttcaaagatattaccactagagttttcaacataacagctcttatggccaagttggtaaggcgctacactagtaatgtagcgatcctcagttcgactctgagtgagagcacttgttatacttcagcgcaagtggtttagtggtaaaattcaacgttgccatcgttgagcccctggttcgattcctggcttgcgcagttttatttccgagatagtttagtggctagaatttccgcttgtcacgcgggagaccggggttcaattccccgtctcggagttctttttgatagtttaacaactacttttttaaatgtaattgttgtttgtcataattttttgctagtttatattgcagagaagaagagtgtccaaaaattttaaaaaacattcacatttctttttatcttgtaataacattttatcgcggactttctaattatctattcctgaagttttcttattgatgttttacatgagatctatttttattaaatgttgttgaacgataaaaaattaataataataaaatttaattttggtaacaatatatttatgtttttttcttaagaaaacatcttgatatacctacaaatttcttaagcaaacgaaccaaaaaagttaaaaaaaagtacttaactgtgatcaaacttttcgtccaaaaatttctgtttgatcgacaactgcaggattcgaacctgcgcgggcagaacccaaaagatttcgagtcttcctccttaaccactcggacaaattgccaaacatggcttaacgccggcctgaattttcatgtcacccattcattaattacgtaatcagatatgcacaagtaataaaacttgtgaaaactaggttcagtaaaaccttttggcaatattcgttgaatataaagcaactttcacttatagtagcgtttaaataatggtttagttgctcatttagccgtttttttggtaacacatacttttcaacacctctgtttaaaaaggagcttcggaataagaccaatacgatgctttatcttggctcacaaggtttgtaaagaatataatttgatgtacttaatagtcataagttttttagataggattaagcaataccattatcgtatacaaattttggtttttttataataaaatttgacctagctttcagtaacttttcaaaagccgtttatcctttttatatatgacccaaccaatattgataaaaagcccgttattcaattttagtaacaagaaacgatggaaattacaaaatgaatcaataattgaaaccaggattgtgaatactgaactaaacattacagtttatagcatgttgtaaaatattatttgatgcacacaaaatacaatttggattgcgttaaatacccaatttctaaaaagtattaaatgaacccatatcatttatttaagattctgcttttgtagttttttagcaagttgattacagtaatatagatatatgaaaagcaaatcattctcataatatttgattcatccaaaataacctcagactttttcacctttgaatgtaaattgtaagttatgggctctttgtttaaaattaatatttacgagaaaaacactactaagggagccaactataaagtttaaagtatataaaataacaacatgaaagaaatattagaaaggtaaaatctggaattctaatgtctaatcaacaatacctaggtttaataagttctttaatattgcaatctatagatgcaagttttttttttgctatcaaaaacagcattaaaaacagtgttaaaaaaccaaactgtataaactatagaataatttgaagtatacaaaataccaacagagacgttattaaacgttggaattctttgctctaattataccaggaattccaacgttaaatatcgttttttttgttttacttgcgtttcttttctgatttgtgagcaagttgctaattcaatattattatttatcatccaggtccgcctgtaattaccaatctcaacatttggaatattattacttattatttagtcttacatagaaatgcaatattctatgtctacatttaataacaacaacaatgattagatgaactcaatgagaaagaaccaaaaaaattatcaatttttctatttaatcagttattttaaatgttatacttccactattttttcataaaataaggattctgtacaaataattgttagattctgaaaccgaatacccctaataattgatatgttaaattaattacgtttacaaaaaataaaacaaaagctagacaacaaatttatatatttttaaaatatagtctggctatttttctgataataaaaaagttaacccaaaataagtcttaaaagtgcttaaaaataaaattataaggtttaaaaacggttaaaaccacaaataagtaaaaaccattagctatttatgcttcaaacaactgttatttttacttttgcccaaagtcacgtgtaaacataaacactgagcttaccagtgagtttgttgcacaacaagtgctcttatggccaagttggtaaggcgctacactagtaatgtagcgatcctcagttcgactctgagtgagagcattattttttatcatccatttattggtttttttttgttttaatttataaaacaattttactacttacttacttatctacagttcctttttaatcaatgaacttaatttaatgaaaacttaaaaaaattctaattaatctattattctatctaaattataaaacgattagtaaaagagaaattgtgtaacattgagagataatatacaaaataacctaaattgatttacatcacaattaatcaacttcttcaacagttgggccagctggttcttctgctgctggacctgcacctgggaaaccacctggagctgcacctggagcaccacctggggcaccacctgcttggtagaatttagtcataattgggttaacaacttgttcaagttccttttgtttatcatcaaattcttcctttgtagcagttaagttagcatctaaccaagcaatagtttcatcacatgctttagttaattcttctctttcagctgcgtcaaccttttcttcgaaagctttttcagatgaggtattcttaacagagtaagcataagattctaattgattctttgatgcaattcttgaagcttcagcttcatcttgttccttgaatttttctgcttcagcaaccattctttcgatatcttcttgagataatctacccttatcgttagtaatagtaatcttttgagtcttaccagtacccttttctaatgcagaaacatttaagataccattagcatcaatatcaaaggtaacttcaatttgtgggacacctcttggagctggtggaataccagttaattcgaatttacctaaaatgttgttatcctttgttcttgctctttcaccttcaaagacttgaattaagacacctggttggttatcagcataagttgagaaagtctcagatttcttacatggaatagtagagtttcttggaattaatttagtcataacaccaccagcggtttcaatacctaaagataatggagtaacatctaataataataaatcttgagtctttgatgattgatcaccagttaagatagcagcttgaacagcagcaccataagcaacagcttcatcagggttaattgacttatttggttctttaccattgaagtaatcagaaactaatttttgaacctttggaattctagttgaaccaccaacaaggacaatttcatcaactgaggatttatcaattttagaatcctttaagactttttcaacaggatctaaggtagatctgaataaatcttgacataattcttcgaatctagctctagtaattgaagtgtagtaatcaataccttcgaataaggaatcaatttcaattgaagtttgagcagatgatgataaagttctctttgctctttcacaagcagttcttaatcttctcattgctcttgggttagtagttaaatctttcttgttctttctcttgaaatcagttgcgaaatggttaactaatctgttatcgaaatcttcaccacctaaatgggtatcaccagcagttgccttaacttcgaaaataccttcttcaatagataataaggaaacatcgaaagtaccaccacctaaatcgaaaattaaaacattcttttcaccttcagctttcttatctaaaccataagcgattgcagcagcagttggttcgttaataattcttaaaacgtttaaaccagcaattgcaccagcatccttagttgcttgtctttgagaatcattgaaataagctggaacggtaacgacagcatcgttaactttacaaccgagataagcttcagcaacttctttcattttagataaaatcattgatgaaatttcttctggagtgaaaactttagtttcacccttgtaatcaacttgaatttttggtttacctgcttcatcaataatcttgaatgggaaatgtttcatatcagtttgaacttctgcatcagtgaattttctaccaattaatctctttgcatcgaaaacagtgttatgtgggttcattgcagcttgattctttgcagcatcaccaattaatctttcagtatcagtgaaagcaacatatgatggggtagttctgttaccttgatcgtttgcaataatatcaactctatcatttgagaaatgagcgacacatgaataagtagtacctaaatcaataccaacagctttagacataattaatatatttgatgtgttttgttaattgaaaggaaggaaaagaaaaagaagggggagaggaaaacaaaaacgaaacatccctcctccaacgtccaacgtagcaattgaaaagttgggaattgagttgtaatttatagaaattgaaatttcaattgaaatttgatgaactgtccatttgaatttccaacaactgagaagaaccttctcgaagattctaaaaaagttggttgagccccattctcaatctagtgattacataatataactttaccggactatgcgtcgatgggtctgtgctttttggtttcattttcattgaagattgattgaactattcggatcgataatggacttaagggtgggtggcgaataattcatcaaggtttaatatctatttcttttcatttgtttcatttgaatattcaattccattcaatctagaattattataggtcctcttcaatacttaaattatttgcttaatttttaatatagcttcaattccctatatttcataaaaaaatttcaaattacaccaaaaaaaagtattatagccattgaacaattaccatctcaattagcaattattataacatttgataagttacactcaacacatacacttacacataaataaataaatcaaatataatataatataatataaaatgtcaactcctgctcgtcgtaggttaatgcgtgattttaaacgtattcaacaagattcagcttccgcatcaggtggtatatcagcatctccattaactgataatgttatgatttggaatgcaattattattggtcctgaagaaactccatttgaggatggtacttttagactttgtttaacatttgatgaacaatatccaaataaacctccacatgttaaatttacaagtgaaattttccatccaaatgtttatgcaagtggtgatttatgtttagatattttacaaaatagatggagtccaacttatgatgttgctagtattttaacaagtattcaaagtttattaaatgatccaaatattaactcaccctgcaaatgttgaagctgcaagtctatataaagatcatagaagtcaatatattaagagagttaaacaaacagttgaaaaaagttggactgaagatttaaaagatattgaggatgatgatgatgatgatgatgatgactgactgaatgatgatgacgactgacgatgatgacgatgaagatgatgacgacgaaagattaagaatgagttactttatgtgatctcaatttcacaagggtccaattacgaatgatcataatatatcggggttacacaagtaagtaaccatgaagctcaatgtagttgttcaattctgaatattttttaatctcattcatcaacttattcactcatttaatccaatctaattcaaatttttatctgtacaaattgtcttttagggaataatgtttctgattgtgaactatatacagctaaactaccgcttttataaacaataaatactaaatataccaattatatgcatcataatagtttgtttaaactagtataaccaaagataataccattttttatttaattttctttccatttccaatttttccttttcttcttgtatcctctttaattcttcaagtttatcattttcctcttgctctattcttttcctttcattttcttctctttcctcacgatctgctacatcccatggatattctggaacattacctgtaacattcactcttctatcttgtttaaaacataataccgttaagaaaactaatgcaactaaaacaattctattaacaggattcattcttctatcttgtctatattgttgtaatcttttcaatccaaaactacgtggatctaatgatggtaatttctttataattgtatcttttgttggattaaaagttttcaatattgaaggtaatttaaatggtaaatctggtggtgtatcaggtcttttattaatttgtaatgcatcaatttctccacttgacatttgtaatgctgatcttgatgattcagatgattccactactaatatcttttgatatattattaataatactatcctaattcagttttcttaatagattttttactaatctcatttatactagtatcatctatagtatctttattatctatatttccattttcaatttcaactccataaggtgtataataatcatgtaattcatagaatcccttctcttggaccatgactaccataagcccaccataaagaaaatcttttaatatctttatctaaacctttccaatttttctttaatttttcattcatttcatctataacatgttgctttttgaaaaatggtaatttctcaaatgcttttggacttgcaaaataaactttacaatcaaaatctgttaaatcaaaatcatcatcactacctgcatttggattaagaattgaaaaaatatctttaactgatgcaagtgcaagtttattacgttcatttttaacattttgctcttgctttaatcttgaattaagtaatttagcagatggttttgcatatttaattgcctttttcacaggtttggatacattagacattctataaataaatattcgacttgattttattctaataaactatacaaaagtagtaaataaaatctgcaaatataaatatcaacatgaatttttcaataatttaaatttggtgaaactatgcacattaaagaaaaaataattatttccattttcgcagtggacaatgttttactattttgtacccaacttggtgatgatcaattcttcattacttctgttgcactttcagaaccaatactataaacatgcctgacgagaaagaaattcaacaagtggaatcaaaaactgaagaagttgcaccaactccagatataaccgcaacatttttaagttcagtaactggtcaaaatgttaatgttaaacttttcaatgattttaaatatactggtgaattatcatcaattgatggatatatgaatgttgtattacaaaatgcaagtgaaattgttaatgggaaagttacaaatacttatgaggaagttttcttacgtggtaataacgtaatttacattggtaaaatgtaaatatgtcttaaatataggatgaaataaatgataatcaaggttctagtattttggcatcttgttttagtgttatagatattgaatggtatgtaagacttgtatattataaaaataaagaaataaagaagtgaaaagaagtgagtcttaagataaatcagtgtcttagatgtgctatctcattaaaattatttttgtaaagtgtgtttgatatatgaatatattgtacttcactacagaggatcctttaaagaacacgtatagtatcatcacattcgttatctctttaaagtgttaacagataacaacatgaataatctccagaacttcctaattaggtaactaaagttgcccgttgtaggaagagtttttaatctttaaattatatttatgaagttgtaagaaataactgagataaagaagaagactagagagcaaaagaagaatttagaatataattcacttatttaatataacattgctttgataacaaatacaagatgtattttattccaatttgtgataatgaggtatcatccaccaaatattgaaagagaggattcaactgcaaagagtttaatcaacaccatttttttcaacaatgctaagaataatagcaatggggaatattttggaattaatcacgatgatttaatcaatcgtgcaaagaatattttattagttcaaatatttatggtttatcaatggtccgtcattagagctaggattgaacatccttataaattgaaaaatttacattttgcatgtaaagaagttacaccatggaattttgttgttgaagattcagatgttaaaatgtatttggagaatccaagatttttatggagattttcagttaataattataaatatttttatggaattttcacaaaaggtatgaaaacttttaataattgtaagatatctgatgaattatatgttgatgaattattaacttatgatttagataaatctgaagtaatgccatattatataactttttgtggatcattagaaaattatattagacatttatttggtaaatcaacaagggaaacttctaaatggtttaaaatgtatgattttaataaactattagaaaattcatcctcttatgaattaaaagattatgaaaaggaagaaattaaatattcatatgattatattttacaaatgattgaacctaatatgaattatgatgattttgtaagaataattgtaacaggacatacattaactgatgcaggaccattattaaaatcagttattgaatatgaaaaaatgttgaaaaaacaaagaaaggatagattaaaggaagctaaaatggaaaaagtcagcacaagtgtagttgagatcaatgataacattgtcatcgataataaagaaattgataattctgtagtggaagcaaatcaaatcgttgatctctcacaagtgtagaataatgatttccatcatttaatcgaaactatagatactatattatataaatgtatttatagaataactaaacaacccgacaataactcaatgaatgaatcagtttgtttgattcagagttttatatttgataatatgtttacccttaatccaagcatctctcacaccaattggaactcttggatctgaagttacaccatcaatcagagtaataactttattaatagtagatttcatcagaagattttgttgttgaacaattgaaatgaaggaaacccaaacaataacagttaagatatttaagaaatttttaccatcaccataacctattaaatttaatgggaaattaaacaatgtccaaataattgaaatgagcagagaagctaattgaaattgaactgcccatccataaccaatttgactatatttagtactaatgaattccaaaacatttttaatttgaatttgaacattagcattgatgtttaatttaggaacaacaaatgtacgtgtatagtttaagacatggaaaagtgagaaaatgacaaatggaaatagagttaatgcagatcttggtaagataaacaaataagataatgataagaaaatgtaaggggttgttgaatgagattttgcaggtttaattagtggctttaaggaagtaataaattcaatgacttgttctttagtatctttaacaacaggttttgaagttgttgaagcagattctttagaagtagaagtagatgaggatgatggtgaatctgcctttttagttgtagcagttaaagattgatataatgagataattaaggaagttgagatgaaaaagtaggataatgtgtaagctctgtagaatgaggtggtaaaagtgagaaaggaaaagaatagagtagccaattgagtaccataccaaacattggataaggtaattaattttttcatgttttcaatgtcagtcatttaagttcctgttgtgtaaataaagaagagaagacattaaaacaataaagacaagtagcctctcccagtgaatttatcaacttagacacccagagaaaaattaaagtttcccaatacggtaaccgttaaaaatatttttcttaaattattttaattttgatgttcctatatataatttagctgaaaagtttttcatttctttgtgtctttcagttatcttctaataaacaatagtagaataagacacaaatatgagacaaaagagagctaaacaatatcgtaaacaaatgcaagttttacgtacaacttttaaatttaaaactccaattcaatgtttagttgatgattcaacagtacttgaatctgcaaagacaagttatgaccttatcaaaggaatcaatagtgttgttcaaatggagtgtaagtttttaatcacacaatgttgtattcaacatttatatgatagtaataatcaacttgcagttgatcttgctaaaagaatggaaaagagaagatgtggtcataaggaaacactttcatcatttgaatgtatgaaaagtataactaatgttgaaggtgaaaataaatatagatatttagttgtaactcaagaagaaaatttaagaacaagtttaagaaatattgcaggtgttccattagttttcttacatcgtagtgttttagttatggaaccattaagtaaagtaactaaaagagttgttagtgcagttgaaagaatgaaacttacacaagggttgaatagtattgatgcaggtaaaagatcacgagattcagataatgaagatggagaagatggtgaaggcgatgatcaaaataatggaaatagacctgttaaaaagggtaaaaaagttaaaggtgttaatccattagctatgaagaaaaagcaaaagaaggtagtacctgctaaatcaactgataaacaagatacagaaagtaatgatgatggtaagaagaagagaagaagaaggaaacatggtaaaaattctactgcaaataatgaaaatgatgaacaatcagaggaaaaagcgaaatagtggcaaatgaacaaagggaagacaaaccaagtgaaccagaacctgttgcaacagaaacaaatcctacagaagtataattagatgtataataaaagtatagattaaactgttttataatactgtaatagaaaataactccctttccgaaataggaaggcgtgaagaagtttggagtagttttcaatcttatagctatatacacacgttttgaacaccgttctttcaagtgattgttagcataaacaccatcagattagaagtgaagaatggattttgatcaactatcaagtgttcgtaaagtttttttggaaagtaatttacttctgactgaacgacatttaatcaattccgcaaaatggtcaagtgaagccttaaatggaatgatccaattaactagagaacaacaatacgctgaatttcaaatgatgaaacgttccaataattttaaatcatccaatgcacctaactctttatcttcaccattattatcatctgcatcatttgaaccttccgcaactgcaagttatgcaataggtagtacaggatttgaaagtactagtacaaacgccaacagtagtacacataatttcacagcaacaaataaaatacttggatctacaactacaggtcaaggatcaacaaatagtcttaatttcttaccatctgcatttactggtggtagtttaactggtgaattagaagctcaacaggattacaataatttaagtggtgttaaaaatgaaaatgaagaatttaatcaatttatagaaagagatgtcatttcattagctgactcttatttcaattgcaaagaatacaatagatgttcagatgttttgaaaaattgtaaaagttatagagctttattcctacgactatattcactatttctaagtggtgaaaaaaagagaactcttgagaatggaacggtattgggtcaaaatgatcgtaattatcaaaatccaaacctgactactataataaaggaacttgaagaatataaaacttcaaataatatatccagtttgaatgatccatttttactttatctacaaggtattattttcttaaaatctaaaaaaatgtcacatgctcaagaaatgttttatcaatcattatcattgtaccctattaattggagttgttggaaggaattaattgtcagtttatctacatttagtgaagcattgagaatgataaatagaatacgtaaaaatacaaaatttacagatcgaaaagaatattatttgatgtttctgttttttaaaattacagtttatcaagaattttatcaaatatctaatgaagttttatccaatttaaatgatctatgtgaaattttccccaatttcagtttcttgaaaactcaaaaagctttaatatcgtataatgaattagactatgcaacggcagagaatatatttgatgatatattgaaatcagatccaatgagattggatgaaatggatatttattcaaatattctttatgttatggaaaatagatctaaactttcatatctagctcattacgcccacgaagttgatccattacgcccagagacttgttgtataattgcaaattatcattcaataaagtttgatcatcaaaaggcaattatgtattataaaagagcattatcattaagtcaagattgtcttagtgcttggactttaatgggtcatgaatttgttgaattgaaaaattcaaatgctgcaatagaaagttatagaagagcagtcgatacaaataacaaagattttagagcatggtatggtttaggacaagcctatgaagtgttagatatgcatttatattcattatattattatcaaagagcatgttcattaaaacctatggataagagaatgtggcaagctataggaaattgttgtgagaaattagaagattatgaagattcaattaaatcatataagaaagcattatcagtttcaatcgattcagatcctgcgatattatgtaaattggggcatctttattctcatattgatgatgctaaaaatgctaaactttacatgaagatatgtttagatcaggagcttaatggagaaattacagatgaaacaacaaaggcaagattatggttagctcaacatgagatgttaaattctaactggcaattggcttataattatgcagttgatttaactcagggaacatcccaagaaatcgaggaagctcgtgccattgctagagaagctcgaatgaaacttaacacatctaccagttctaaaaaggcatttttatagtataattatgatttgtaaagctatacgattatttatttatacataagacaagataactaactaatcgataaatagataaaaccacagagaaagaagtcgaaagtagaaactccagaactgcgaaaatagatttacgtaaaatttatttttgctttctacatgattatttttgtcttaggtagttctttctaatatatacgtctataacatacatttatactagtaataaacaacagcctagtataggttttgaaacaaaggaaaaaaacatgcctcctaaacctaaccggccaccaaaaagaccggcaatgccaccaccacctccttctaatggtgcagcatctaataattcaagcaaaacatcaataacacctggtgaaccattgaaaaagaaagctaaaatacttccaccaccgcctccgccaccaagatcattacaaaaacctccaccaaagccaaatggtgcaacaacgacatcaaaaatatcctcaaataaacctatttctcacacagctccaccacctccacgtccagcaccacctaaaatacaagtggaaagtatttccaaacctaatatagatatagaaacattaaaggaaagaactgaaaaatggaaaaaacttcaaaaacaacgatttacagagaaaaaagttcaaaaaggtacttatgttcataatgttaaatttgagatgccacctgaacatataagaaaaattatgacttcacaaggtgatttatcatcaagatcatttaataatgaaaaacgtgcaatgttgggtgctcttaaatatttacctcatgcattactgaaattacttgaaaacatacctcaaccatgggaatctgagaaaactgttaaagttttatatcatacaggtggtgcaatatcatttgttaatgaaattccaagagttattgaacctgtttataaagctcaatggtcaactgcatggattcaaatgagaaaagagaaacgtgatcgtaaaaattttagaagaatcaaattcccaccatttgatgatgaagaaccatttatgaatttttctgatcaaataccttcaattgattcaatacaaccaatacgaatggatttagatccagtggaagatgaagcagtgtttgattggttatatgatgaaaaacctcttattgatgatttagattttgtcaatggtgaatcttatagaaaatataacttgaatattaatacaatgacaaatttacaaagattagcaacaccattgatacacgatgaacaattggatccaaattatttttacttatttgataaggaatctttgtttactgcgaaggcactaaatattgctttaccaggaggtccaaaatttgaaccattatacaaaactgaaaatccagaagaagaagactttaatgagtttaattccttagatagaatcatttttagaagtccaataaaatcagaatataaagttgcatttccctatttattcaattcattagtcagatcaatttctcttccaatataccaccatccaactgtattatttactaaaactgacgatccagaaatccccgtattccattttaattcagattataatcaaatacgtcccaaaataggaactaccaatatctacgaattggaagattttgatcaagaaacaggtgaattaattaatgattttggaatagttgatgatatttcattcgatttaccagaagattttgctccatttttagaggatgaagacttagagcctaataaaaatacatatagctctttggaactttattggtccgctaaccctttcaattctagtacaggtgaaatgaaaagagctcaagatgtttctttagttaaaaaatggtattcaaatcgtccttcctctgatgagcgtgttaaagttaagatttctcatcaaaaacttttgaaacatgatgtgcttaatgaattaaaaaaagaaaaactttcatcaaatgaatcaactcctaaactattaaaagcattgaaaaacacaaaatttttccaagaaacttcattggactggattgaagctggtattcaagtttgtaagcaaggccataatatgcttaatttattaatccataaaagaggtttaacttatttgcatctagattataattttaatttgaaaccaacaaaaacattgtctacgaaggaacgtaagaaatctagatttggtaatgcattccatcttattagagaaattttaagaatgattaagatgatcgtagatgcacatattcagtttagattaggaaatattgatgcatatcagttagcagatggtttatactatgcaatgaatcatatgggtcaactcactggtatatatagatacaagtataaagtcatgcatcagatcagagcaatcaaagatttaaaacatgttgtttatagcagattcaataaaattattggaaaaggtcctggatgtggattttggcaacctgcatggagagtttggatttttttcatgagaggtattattcctattttagagagatggttaggaaatcttttaacacgtcaatttgaaggcagacagtccaaagaagttactaagacaattactaaacaaagggtagattcatattacgatttagaattaagagcagctgttatgaaagatattcttgatatgataccggagggtatgaaacaaaataaatctaagacaattttacaacatttgagtgaagcatggagatgttggaaggctaatattccttggaatgttccaggattacctttaccaatagtcaatattattgaaagatatatcaaggccaaggcagatggatggatttctgttgctcattacaatagagaaagaattcaaaagggtaaatcaattgaaaaaactgttgtaaagaagaatttaggtagattaacacgtttatggattaaaaatgaacaagatagacaattagaataccaaaaagaaggttcctttgtatctcctgaagaaggtgtggaaatttatatgaatatggtcaactggcttgaaagtagaaattttgtccctattccatttcctcccattaattataaacatgatagtaaaattttaatcttagcattggaaaatttaaaagaagtttatcaaggtaatagtagattaaattctcaagaaagacaggaattatctattattgaacaagcatatgacaatccacatgaattcttggcaaatattaaaagaactattttaactcaaagaaactttaaggaagtgaaagttgaaatggcagataactttagtagtattactcctgtttatgatattgaaccacttgaaaaaattgttgatgcttatctcgatcaatatttatggtatgaagctgagaaaagaggattgtttcctaattgggtcaaaccgaatgatgcagaaatcccacctttacttacttataaatggtgtcaaggtattaataatttaaatgatgtttggaatgtttctgagggtcaatcaaatgttgttcttcaaactacacttgataaattaggtgaaaagatagatttcacgttacttaatcagttgttaagactagttgttgatccaaatattgctgattatataacatctaagaataatgttagtatcaactataaagatatgagtcacatcaatcaatttggtattattaaaggtttacaatttgcatcttttatataccaatattatgcattagctacagatttaatgattttaggaattgatagagcaactgacattgcaggcccaccagataatcctaacgagtttttggaatttgaaagtttggaaaaacaagattctcatccaatcaaattgtatatgagatatattgataaaattaccatttttttcagatttaacaaagaagattcagatgagttgattgaagattacttatctgaaaatccagatcctaattttgaacaaattgttggttataataatagaagatgttggccaagagattcaagaatgaagttaacgaggcacgatgttcacttaggtcgtgctacattttgggaagtttctggtcgtttaccaaggtcaattattgatttgaaatgggaaaatactttagcgtcagtttattccaaggataatcctaatttgttgttcacaatgtgtggttttgaaattagaattttaccaaatataagagcaaaggaaagtaaaccatcaaaagaaggtgtttgggatcttattgaggaaaacacaagagaaattactgcaaaagcgtatttacaagttactcaagaagacattgagaagttccaaaatactattagaagaatcttattatctgctggctcaagtccttttactaaaattgcaagcaaatggaacactgctattttatcattatttgtttattaccgtgaagcgattgttgcaactgagccacttttagatattattgtcaagtctgaaactaagattcaaaataaagtcaagttaggtttgaactctaaaatgccaactcgttttcctcctgctgttttttacacacctaaagagcttggaggtttaggaatgcttagtgcatctcatattcttattccatcatccgatcttagatggtctcgtcaaactgaaactggtataacacacttccgttctggtatgactcatgatgatgaaagattgattcctacaatttatagatatattaccacatgggaaaatgaatttttagattctcaaagagtttggtcagaattttcaagtaaaagaagtgaagctgaacaaatgaagaaaagattaacattcgaagatttggaagattgttgggacagaggtttaccaagagtcagtaccttgtttcaaaaagataggcaaactcttgcagttgataaaggataccgtattcgtaaagaatttaaagaatattcaatcattagaaacaatccattttggtggttatcagatagacatgatggtagattgtggaatcttagcgcatatcgtacagatgttattcaagctcttggtggtattgaaactattctagagcacacacttttcaaaggtactggttttgaatcatgggaaggtttgttttgggaaaaggcgtctggttttgaagataccttgaagtttaaaaaattgacaaatgcccaacgttccggtttatcacaaattccaaatagaagatttacattatggtggtctcctacaatcaatagagctaatgtttatgttggttttttggttcaattagatctaacaggtatatttttacatggtaaaattcctactttgaaaatttcatttattcaaatttttagagcccacttatggcaaaaaattcatgaaagtatggttgttgatttatgccaggtttttgatagtcatctagaagaattattaattgacagtgtccaaaaattaccaattcatcctcgtaaatcttataaaatgaattcatctactgctgatattttattaactggtgttactcaatggaattgctctaaaccatcattactttttgattccgataatcaaagcactacaattaagagtgatcaattttggattgatgttcaagttagatatggtgattatgattctcatgatatttcacgttatgcaagagctaaatttttagactataccactgatacaagtagtgtttatccttcttccactggtcttttaattgcagttgatttggcatacaatatgtatgatgcttatggtaattggttccctggattgaaagaattagttcaaaaggcaatgaaaactattatgaaggcaaatccagcaatgtacgttttaagagaaagaatcagaaaaggtttacaattataccaagcgcaaccacaagaaacatttttaagttctagtaattatgccgaactttttaataatgaaaataaattaattgttgatgataccaatgtttatcgtgttgtaacccatagaacaagtgaaggtaattctgcaattaaagttttgaatggtgcattgtttatgatcaatccaagaactggtcaattatttttgaaagtcatgcatagttctatcttccaaggtcaaaaacatagaagtaaaatatctaaatggaagtccgctgaagaagttgctgcattggttaggtcattacctagtgaagaacaacctaaacaagttattattacaactaaaggtattttagatccattagaagttcatatgcttgatttccctaatatatcattaagaccaacggaacttaatatgccgtttgatgctgcattaaagattgaaaaattaagtaatttagtcagtacagcaaaagaaccacaaatggttttattcaatatctatgatgattggattgaaagttgttcatcatttactgcattcaatagattgatagttttgatgagagctttacaagttaatgatgttaagaccaggatgattttgaaaccaaatagttcaatagtaacaaaagaacatcacttatggccaagtttaacaatggaacaatggagagatgttgagtcacaattagcagacttgattttaagtgattattctgagaaaaatagtgttaatattgactctttaactgataatgagattagagatatcatattgggacaaaaacttaatgctccatcggttcaaaatcaaaagattatggaaattgaaggtaacaaggtggttaatcttaataacgatgagaataagatggatgaggatgaggaagaaggacaaaaaatttcaaccaaaactaagacagttaatgttcatggtgaagaaattataacagttaccacaaattcagcaggtcaagagaaatttgaaggtaaatcaagttggagaaaaagagcaatcttggttagtatgttggaattacaaaagagtaaagtttttgttacatctggtaactttgcagatgaggaaagtcatgcctttgttttacctaagaacattctgtcaacatttttatcatgttgtgatactagggtgcaagttgggggttacatttatggtaaatctccagcagataataatcaagttaaagaaattagatgtattgttattgtgcctcaacttggtgaacataatcaagttaatttcccggattctccagccaatagcaaatatttggaaggtttagaaccattaggatggattcatacaattccttcaggtaaagaaacggacattgatggatgttatgaaatcatcaatcatgcaagaatgaagaatgattacgaatggactaatcaagcatcagttatatctgttgcaattgcaagtggtaatgttactataactagtaatcgtgttacaaataatggtcttagatggggtgttaaatatgctaaatatttggatcaagctgatagattaattcattattctgatgattatagagttagtacaccattgatattgacagaaaagtttaagggatttactatagttcctgaagctgatatttggaattacactttcatgccaaattcatggaataaagatcttgattacagcttaaagattgatcagccattaccatttttccatgaattacatcgtccaattcattttgatgcatttaataatttagaaaagagtagaattggtgaggatgaagatgatggtcgtatggaagtagaagcagaccaggaagatgttcttatgtaaaatatgtaaaatatgttataattatttaacaatagccaaacttatttttgattcttaatatccatcaaaggattaaactttatctctcatcaaactaaaaaattcaagctacacaatttatttacactatattaaagtttatttcatatcttttaactcgtattcttcattatttttggtattagaaggactgatattaggtgcagttttgcttcttgctgcatcctcctcaaccagtaattctctcaattttccctttaccacagtttttgtttgtgaaaacatagcattaccaacggatatcatcggtcctaacatttgaacattatatgcaacatataaaccagttatggtgaatattgcaagaataaataaaattgggttacgaacaacaatcatcaattcgttccaacctaaaactaataataaaacatacatgaaagttggaatactagttcggtttgcaaccattgaacgtttagcatccaaatatatagcatcagattcctttttaaatctttgatttattttggacttcctgttttgtagttaataatgaggcaaatctatttttcttcttcccttcataggattgttcattatctgagatatctgttgattcataacccccgtaataatcagcatcatcatcatcatcatcttcatcactaacggaatcattaatagaatatacaggtttttgaattaatttaccatttgataacttcattgcactaaatattggaagtgtctttttagctgtttctaccgcattattaaattgtgaatctatttgattaaaatccttccagattaacggtaacccctttccatcgtatttgaatttatcttcaaatacagttcttaaaactcttgagactgtttcttcgttaacatagttatgaacaatgttatcaaacttattccagaaacttttcataagtcttaaatgtaatgattcattcaagttttcactaagtccaattttaaagtcataacttgcatttaataaatatggtttcaacagttttgatgttaatgattcaaatttcgagtaaatattatcccatgataaattagttggctgagataattcttcgacaacgtattctttaaagttgttttggaactttctagataatttatttatcaatgatttagattctttttgtttcaggatgtttgagaactcttcaagacgtttcttcaagtctgcaagttgaatttcgtattcatcctgataaatatttgcagttgtatcttggtcagtaaattgaaattccaaagcttttgattgaaaatcagcaatgactccgtcagtggttgatgttaaaatatccagaaatgccatacctttacttttcttctttaaatcaggaaatttggtctcttgagcagatattaagctatcagctaagtttttcaaaatttttgaatagaaatcctttaatttgatatcaattttttcagctaaatttgaacgtatatcagtataaactgcattttgataacgtgaagcttgtgaatcataagcagagagacatttgtttcttaaagagttaaagatgacacagctaccagttggattttctaatggatttccaacttcagtaaactctttagtaaatactgcatcataaacattattcagtatctcattacacttgaatttagaaactaaaatttgctgagttggtaaatctaaatctttattatcttcaatttgactccatattttttctgaatataatgcccatgcatcaattggtatctttctatgatatttattattatcaaagaatgtatcattagagaattgatcacctaattgcattatattatgttcaaactcgtcaggtttatagtatttatgtgtaattgagaagaatttaagatcaaagaaatcatcaattttagaatcaatacattcatcaggtttatttaaatctgtccaaattttattcatatcagcttcaagtgattgacccaagtttgataatggagtcatacctgtaaaatctctaataacaaacaataaaagacatttttgtttactttgatggaataatgaaagattaacttccataacagttttcaataattccatatttgcaccttgatataaaccaacttgatgttcaaaaatgttaacaattaaaacttcggaagtagctaatgcaaataatgctgatttacgttcaaaatctttatcatcagcacgttctctaccatcgacaccttcaacatctaaaacataaatgtttgtatcattagctttttgtttttttaatcccacattttcggtttcatccccatttttttcagttgaagcaatataatttgcatgtgagaaccagataccctttgtagtttgttgtcttttctcttcatccataacatcgaacttagttccaaataatttattcaaaagtgttgatttaccggttgattgagaaccaaaaactgaaacaatatgataatttaaaccattatcatcattagatttaccgacataacatttatccacgtattcatcgagatgtctagcaaaatgtttttcttcatcaatcaaatggactgataccattgaagtgtcatttaatccagtatttgccatatcaattaggttatactagttttcagaatgatccaatggatattgttaatacagaaacaattaaaagagtattttattctaatcaatcactgatgaaattgatccttccaagggactgaatagcctcaaaatcaatttcaacaaaatttacttagtgttttataaatctcgcgtttatagtgaaatttcaatttttcaactgaggtggcgaatttcatttacatttccactacttttggtggctctgtttccttttattttaccttgtatttatttcttttctagtcaattaatatttacaatcaattagacaatacacgaatatgaatcttaactaaataaaacaatattacaaaaatgtttgtttaaaatgaacaaataagtatctgattattaactttcaagtctcatttcattattttgaaaatgctctatatttttgatattaattcctctttaaaatcattcaattgaatcaaaatttcagtatttcattaaaatcacctattactactcacatacattcttatatgctaattatcaaaagaatacccacaattagccactacaaatacatacaaatctatgccaatatgaactcgacgcatcgacgcgcgcattggagttggaaaaaaggggaaaaaagttgagccaccaaaaatatttcaaattcattgatcttggaaaaaggggaacatgataaccataataatgaaatcataatagagaaatcacttctttgggagatactttatatatttgtttccctttttttggtatttattgtgctttctaataagtttccccttttcccacttttttggtttgtttgttatactttctttttcctccaaaactttaaaacttattatcttttcgttttttaacgaactcatagccagttagttactatacattaaagttttgaaatttaataccagatacttatttcaataatcccttaaattaatcaattattaaaacttagaaatgtatttcaatcctaaagaatattacttcttttctgataaaatcaaggaagaattaactgctaattcattcccattctttggaactactgaatttattgaagctgatgaaactaattacatcaaattcaacaaatgtattgtttctgttgtttcccaaaaagccattagaactcaaatgtatttattatactgttggtcattaatctattattatttctcatgtagtaaattgaaaactgtttcatttaacaaaatgttgtttgatgttaaacctgctatgtttatgccatctgatgaagaaatcaaattgtatatgtctaatcctaaattcttatggagattttctgaagcaaattatcaatattttcttcagttttttgatcctaaaagtgtttgtggtaattttcaaatgagtttaattacttatgataaggatgattcaccaatgatgccttatttgagaccaaagtttttaaattctatgaaactcaaactttcgaaattgctccatttaaatgataagccctttggttgtaacactgttgatgctgttttgaataaattcaaatttaagttaagtgatgatgaaacttgtgaagcttattattctgatgatttttatgaccataaaatgcatgaatattcaacatattcagattttgtgtatgttattttgactggtcagaataattgcttccctgctaaaccgaatcacttcagtaaaccaagaagctttaaacagttggtgaataaaaggaagcaaaattttaaaaatattgcacctttattatttagaaaagtaattaaagttaaaattgctaaacctcaaagaatcaagaaaattgacaaaaagaaagaaataattaaatcaagaagaactgaaactaataaacttgaaattgttccagttgttgaaaatattgaaaaatcattagaaatctctagtcccagttgttgaaattattgaaaaacaattacaattatttgtaccattacctcaacctgttgttgtcgattctttagacactaatactcgccatttcatctgttgtaaatgaaagttatgaaataattaatatgcaagctgttgatcatgaagattatgaaataatggaagtcctttctgttggtgattctttggatgttaattattccacttcatctgatgaagatgataaatttgataaatgttcatgaaatagttaaaattcaatctaaatctgattccaaacagagttcatcttcatgtgtgaacttattttccagtccagttagtaatgaaaacaatcaatcaaaattcattgactccaattccctattaaatcaaatgaacttattattgcctccaacaatgttaatatgaaaccaattgataaaaatgatgattataataacaaattaaatcctgtatctgcttcttcaaagaaatccattgatgccactaattccaatgatatttcccctaaaattacttcttccatctccaatgattttgataaccataaccatatttacattcaatccaccattatggaatcaaaatcaactcctatcaaatcattagactcacctatttacattttttaccacttattaaagagtatccttttcaattcaatggtcagtgtaggaattatagcaatgcttttattatttacatttgaaaaatttacattagaatacaatccagaaactttagaacaatccacagaaagaattgcaaataattttttatctgactttgaattgaatttttactctaatgatttgatgaaactccctgaagatgaagatacaaataaagaaacagaaatagattttaatttgaaatttaatcattcagattttgaagttgatgaactcaacatgaaggaagcaaaaataaatgaatttgatgaaaagaattgctcaattattgagattgatacttcaaactctaacacgaactatgataactcacaaatgtcatttattatctcttatgctgaatacagaatatttgtaaaggtccaaccaatgttttatgaaggtgatgtttataatttctttgatacaacaataattgaaggtgattatatttacaagattgttaattatctcccattagattactcacatgatttctattatgatttacaagtaatggtttcatccaattttgaatgtttcaatacaatcaaaaatctactgctgaatgcacctaccaattattatccaggtgaagctgatgatcaaattaatcaaattgaatggaatgatgaaaatactaataatgcttttcaactgaattctaatttatttaaagttggtttatctggaaagaaaattaatatccatatcaattttacttcacctattgaatattatagaagatcttttttattaactgctggtcagaaaaaatttaaaaatgataaaaatatggtttcaatggtgacaaaaatgaaaagtaattatggatggttttttaaattaaatcaaaattaataaattttgttatgggtttatgatgtgaatatattcaatattttagttatattaataaaaataataaaataaatcaaaataataataataaaataaattaaaataataataataaagtaaatcaaaataataataataattaaaaaaagataataaaatgaaattatctctttctcttctttctatttccttttctcctgtgtaatttttataatactgcttaaaatgtatttgaatttttttaaactacgctgtagaacttataaaagtgagttacaatcttataaatgcattttatttacgtttagatttaccattcttaaccacaaatacactcacaggtattccccaatacttgtttaaaaccttgataacctcagagtcttgactaccctgaatattaacaatcctaccatctttaggatctttagcttctgtaattgtacttgaactactacatttgactttcaagatatcagctaatttttcaacatcaacataaaacttttcaacaccactgatacgtgtaacgtatttcctacgagatctaacattttcaacatcaatattaattgatggaactttacctttattgtatgagaatctcttcttctttaaaatgtcattactattttcatcaccttctctatataacatatggtatggagaacaagttgaaaccacacgatctgctaaatcggctctcttaatggctgttttaatattaaactctcttaaaatgtcatcaggttcaatactttgtggatccttctttgaaactatttgtgggttttgtttgatatataattgaacaaactgtttaatctccttttctgtgtaataagaatcatattctttgtcaattttgttgaataacattctagcagcatttttaggctttagataatttttcaaaattaatggcggttctggttgcattgaaacactatcatcagatattggggttgaaacaccggatttattatcattatttgcagatttcttgattctatatggaacaaattcggcaactcttggatctgaacgtggtaaaacggatacaataaccattttatcatctttaccttttagttttaataaattatccttttccatagcctttaaaaactttgcagttttcttccatgaagttttcttcatattgacaatattagtatcaacaggtggaagatttttcaagatatgacctgaaataaattgcgttgcagtaattggaaattgaattgtatcctgacttaatgtgtataaaacagatcttttaaacatttcatcaatatcttccgtactcatgacgtattcatctgattcttcttcattctcagtttctttaatttcaagattctccattttgggcacaacttcattatcacctgcactcttggtatttgaatcatcaactttatcctcaacaaccgtttctgatgtttcgtctactttaccagtttctgtagattcgcctttagactcttcttctacctttttcaattcggattgctctttctccgtataaacctttgcatcctctaatatatcagttagatttctaccaagctggttaagtttatcacctgggtatgtgaaaatattcacagcaacaccggaggaaggtgcagtatcattagttttaccttctaagtccattaaacattcaccaacagcaataggtatatttggtttaaggtaattcacaacagcaacaatagcaccatttttcaaaccagcaccaaaaggtccaatacaaccacgtatcattaaatttgcaccattcattaatctatcaataactgcatcatgtgtcatgatagttggaatacacacaaaattatcatcagacgtgttgattgataaatacagtccttgtagagttggaatgaaatcattaccatctctgagttgacagaaaattgggtccttagttgttgcatcgtaataaatcatacctttcttgatttctggagtgttaaatactgcctttgacatcttttcaggaactctgaaacctttcatctgtgtttcaatgtcattttttaacttccttctttcagaagatttcaaatttgcacttggcttaacttctatagtttttctgaacattactgtgtatatttttatgcaatatttgagtatattatcaaataacgaaaaaatcagaaagaaagaaataaagacaggaaaatgcatgataaatttcatgatggaaattttggcgtaatttccagatcttgatattccatgtttattttatgtatagttctttcaaaagtatccatagaagtaccattcataacatagaaaaaaccgtaattgagagaagaatgagcttgggtacggcaaaacttccacatcaattatcaaactcatcatgttttacaatttgtcctcaatggatttattatcatttcaattgaatgatacagttatttggatatatcgtcaaggaaacgaaaaagtatgggatatagatattaattcactgaaaacagatgatgaagaaattaacggaactcaacaaaagctgatcaatcttgtttggaaacctgatggtaaacgaattgccatcgcatcaaataatgggaatctatatttattcaatgcaatgcaaggtaatctaataagaaaattgaaattgaatacagaaatatcatgtttgacatggaatgaatgtaaaataagccatactaaagctaaatcgaaaggtgttgatggaataatagatacaattgatattataggctcaatgccagcattgagatctagcataggaaatgtgaaaggcatgtcaaataaaaagaatcctgatagtaatactcataccaatataaacacaggattgaaatttattgatgatgaagatgatgattatccacatgatgaagaggatgataaagatgataaaagtttaaatgttatacttgcaggttcaaatgatggaagtttaacttacatttttggtaacatttttgtcatcgatgatatctgtatcaataacaattttaacaactcaaaaatcattgaaattatacccaacaaatcattgacataccaatatgtgttagctgaaagtgaagccggttttagtgtttccaagttaagtacacaatttatttataatgataaaataatgaacaaggtattaatgatttcttcaaaactattgaatgtgatgttgtacttaaaaagagcaacgaagaagttagataataagtacaaattgtacatggattatactattagaattattgaactattaagaggtgaaattgctgaagatgaagagaataatatttctaatgaaaataatattaaatttgaaagtaataataccgatccaatttatgacttatatgatttacttttaacagggtcgttgtctaatgcaactaagaaatggttaactgattatttaagtgatagaggtattaaaagatggtcacaactaggaagtacttatttcaataatgcaagaattacaatctataatcatattatttcatcactacaccatttcttcatatatttaactgatttgaaaggtttaacacagtatgatataaatagaaattttgaatatacagatcaaatagatgaatgtattaaaatatgtcaaacttttatgaaatacgcatatcaatttatgatcgagttgaaagaaaatgaacaacattttgaacaaacagttatatggttatcaaatatattatctgagataacaacagatgagaaagtcaatataacgtttaagactaatgatattactaaatttttgattttcattagtagtaagttaaactcgattgagagtaaaaatgatgatacacaaattgacatccacgatggcgataatgattattctaaaattaataaatttaccaatgttttgaatattaaattggataacctcttcgaaaaaatcaaaagagatgtaaaggaagagataattatggagaaaagtattattttaacaaatcaaccagatgttaacaaagaatataaatttaaaatatttgatactcatgggtttttatatacaactaagaattcacatattattatgcatagatttgatttggaaactttgcatgtaacctattttgagttcaagatcaacaccgtccttgaaattatagatattgaaatggttagtgccgatatgttttccatattgtacgaaaatgttgccatcttttaccaaacatcatacggcgataaatctctaacaatagcatgtacctataatttggaaaaaatcacaaatagtgaagaaatgatgaattttaaatcagggtatttagcagttaataaaacaggaaaatcattctgtgtattagattctgaaagaaagaggtatctatggctgcaaacctttttataaccatatattcataaatgatatttaaatctttgctaaatcatataaattttttatttcttcagacatttgctttctatgtgagtcaatttctgatttattcaactcgcaatcattatcaatatagaagatattgtccacgaatgtacaatatgcctctctcattaatccatccattcccgctaaatccatagcattgaaaactttcatagtttctttagacactggacgagttttcaaataaaattgctgtagttttataagtctattcaatctcttgttaaaaacacgacatggtgcaattggtcctccaaatctatcagcatctagttcaagtttcagtaatggtggtcccaatttcaaattcaatttggaattatattgttgtcttaaatgtatcagtttcttcaactcttctgtagttgctatatgttgaacatttgaagcatatggagtttcacaattgaaattcaattgtaagattttattcattggagtggattccatttgaacttgatcatatggtttctgttgaaaaaaatattcaatctgtgtgtgtttccataacttattatatcgatcaaccatatcagttgcattttgcttatttaaaaatgttatagtatgtgataatgatagtaagttaccataactcgcaacaaaatcaactttctcctttttatttcgtaatttgtagtttaaaaagttcgtaacaacagatggatatactgtttctaacttaggtgattcaatatgtgtatagtttagcaattccaatagtttatttgtattttgttgtttaaaggtgttatctgactggattaaatgaattatcctatttttttgcttactttccttagaatttaccaacactttttcaaggcaatcagtggtgtactcatccaaagggatattctttaatttccgagccaaattcattgtgacaggtcactataattgccagtgaaaagatgttcaaactactaaaatatgacgaatttttcaaaaattccaaaaattccatattgacatgaaattctcaaaagggaaattaattatttgtttacctttaattaaacttcttcttcttctttttcttttgagattatattctaccttttcatttgtggtttcagcctcagttcagtgctagttgttgcaattaacatgtcagataataaacagattcatcgtagcaggttagctcatttgaatgctgcaagagacaaggaaaatgctcttagatttcataaaagcaattttaatagtaataaagatttaaaaacttgatgtttcaaagaaagaaacagttgaatcatttggatttggtagaccaatcttacgttctaaatcaacaaatggattgaaagtaaataataatcatattcacagtaataatcaaaatatcaattcaattcctaaacacagtataccattaaacaccaaaccattattccctgaatcagagaatgctaataaatcaagaaaaatcaataaacaaccaatttctatctttggaagtatagactctaatgaaaatgaaaaggaaaatgttgcatatcatgatactacaacattgcaaaggtcacattcacatatggaaattaatcataataatgaaaataatggtactttcaataaacgtaatactctctcaagatcatcatcagcttttggatcatcatttggatcatcattcaataattcactgaaaccaagaattaaatctaaattaacactgggtgctgataatgatatggcagcatttttcaaatcatctaaatttaatgatcaaaagcaatttggaataaataataaaactatcaatgattttgatactgcaattgatgggaaggataaaaataatgatagtttcaatgatagtagtatcgatatcagtagactggaggaagttacatttactgatgataatgatgatattacaatgatgaagaaattatcaacagatagaaattctcctgtttatcaaagaactcataaagttagtatacatacattattatcttcctcaactgataacgatgatattggagaaactacatttcgattataaagatactgagaaatcaaaaccttataaactggttgatctggaaagtttaataatgtctaaacatcatgaggttttagaaccagaacctgaagttgaaattggtaaaatacaagatgatgaatttgaaattgagcatataccacataataaaaatggaagtatatgatgattctatccccgatgctgtattagatggagaatatcaaagtatgaataatgttttaggaaatctatggagtaaagataattcagcaagttcaataagttcaacttttaaagatcccacttgatttaaagttcaaagaagaagataaaaaagaagatattttaaatagtatacaatctagtaattttgaaccagtattagattttgataatgcactgaaattagagttttctgatattgaagaagaggaagaggatgatgaagaggatggtaatgataaagataaagataaagatattcagccaaattttaaaattctatcaagataaatcaactatatagtttaaatctatagacctatctataaaactatatattctagtatgtaaaataatcattagctttgtttttaaatatattctattttctattctatgcttctatgtacaagtgctatcaccatccaaaccaaccaaaccattttgattttgaatcagttccaaaatttttaacatcagtattattgatataagtattgaaagttttaggaacactatttttatcctttatttgaaatactgttggttgactatcatcatcattatcatcatctgcattatttgaagcatctttacttttactttcattttctttactattaacatgacctaatacatcaattaatctatttttatcatttctctctaacatccaattatcctttgggaaaatatttcaacaccaacatataaatcaccatgagatgaaaggtaagaatttggaattggcataccttcacctttaataataattgaatcaccaggttttaaaactttacccattggaattttaatatttaaccatctattatcaattgttttaattaaacgattattttcaaatccacataatgcatcaactaaattaattgaaattttcgtaaataaattatcaccatctctgaaaaacattgaattattatttaattcatcatcttgaataaatttaaaatttaaaattgccttaccagttttaatatttggatattcattacccatactactcatttcaaccgtaccaatatttggtgaacctttttcaattttaaattcaacaatattttcatcatcaataactaaattacctttacatttcctacatttatcatcaggtcttgaataaatacctaaaccttcacattgattacattcaactctttgagcaaatgtcataccacccattcgacgatattcttgtgtgataccttgaccattacaaattggacaagttattttaactgcatttttccttaatccattacctttacatttaacacaaataattttccttttataagttttcttaattaatttaccaaaataaagatcagataatgtaacatcaatatcaaaagtaatatctaaatctttacttgtttgacgttgattaaaatctctatgattatttgttttcctattaccatttccaccattacctgtgaaaaattgtgcaaaatcgccttcatcaaagaaatttgcaccatgtcctccaccattactaaattcaaaatcaaaatcaaaatcatcgaatggattaccatttctattattatttggtcctccacctaaatcatattcattacgtttatgttcatctgataaaatttcataagcttcagtaatttctttaaatttaatttcactttcatctcttaattcaggtgatactttatcaggatgatatttaagtgccaatttcctataagcttttctaatttcaccttcagttgccgatacttcaacacctaatacttcatatagtctagccattgctttatattaagcttaaagaaagaaattatagatcaatattaatattaaataaaaatatatactccacagtaaatcattttacaaagatttccttacataatacaaaatttcacaaaaaggtgtttaaatagctaaatagatagagtttctacgtttacaccaatggttcataagctgaattggtttcgtttggagatttctcccattgatgaacagtcataccatcatgaagtgtaattgtttcttgttttaatgaataattgaaaaaccaaggtaataatttaaacatgaataaccagtataacatgcataaaaataaaattaataatgaagtaactgcataatttggtaatgaactatcactatcactatctttagatgattgaattaacggacctaagaacatgaaaattgagaataaaatcatgaatgaaatatctaaatatgatgccttaatatgatgatcattttctggatttcttttacgtaaaattaaaataccgaaacaagctaaaccaaagaaaatttgtgttggataactctctaaattaattgcataattgaaaatatttgaatttgaaggtataattagaaatattgaagtaataaagaatggaattaacattgaagttaatggtgaattaaatggataatttgatgcaaagaatttactaaatggcataaaaccttctctaaaaatttcttgattcattcttgaaatatgatataaaaccgttataatattaccaccaactgagaatgcaattaatgatgataaaataattttaccaaatgaattaccgaaaaatttttcaaataaaactaaaccaaccatttcattaatttctaataattcatctgatggtataacaattaaataagttaaattaattaataaatagcaaatattaattaataaaattgataaaggagcagcaattttcattgtattaattggatctttaatttcacctaaaacattatgagttgtatgccaaccattaaatgagaaaataccttttaaaattgctgaagtaaaggaagcaattgtaacatttgttttaacattgaaaaaatcttttaaatgtaaattattatcaattttagtaattgatgaaggtaaaattaaaacagataatcccattaatgaaacacataaaagtaaaataattttcaaaaatcctgtaactgtttgaactttaataacaaattttgttgaacataataaaagtaaaatagttaagaataaaaatgcaaatccaattggtttactataactttccataactggaccatcatcaatccctacagcataaaggaaatattcaccaaatatgataacatttgcaataattgaaccaaatataacaatgaaaataccgaaaacaacattaattaacataaaaggtttattataaataattgaaagaaaaacttttaaaccaccagaacgtggtataattgaacctaattcagagaaacacattatacctgcataacttgaataacctgcaattaaccaaactaaaaagaataaaaatggtgaaccaccaacatctctataaatcattgcaggtgttgcaaatatacctgatccaataattctttgaactaccatcattataacatcagttacaccaagatgacgtccatgaggggtttcatcgtgtgatatcattgtttgataaatgaaagataattaaagtaagatattattattaatcaactataaacaaccttaattaaataaataaaactgtggattactgatatatatagtatattagataacaacaagcaggagattacgtaagaacatagcagattatacgtatatcatgtcttatatactcagactatataagataccctaccacatgtacaataagtatacgataatagaataaacataaagaacaaataataaaagaaacagacaaaagaaggtcaaagtaagttactgaccaaaaaaaaagtcaaatttttatatcaacataataaggctcatctctttatatccacacaccttctttcatcaatgccagtaacaacagttcagagagccactattcaaactcccaatggatggaatgaactcccattaccattaacaatccatcaaactggtcaaaacctatatttaggaaccaatatgatttctaacataattaaaatatatatcagaggaaatgatattttaattaaacatgcacaaggtaaattacaaataactctttccaatccaaatgatattaatgaatggtgtacattttggaaaaatattggtattgaagtaaagtataaggatgataatgaattattaaaattaattaatgataaattatcaactaatgaatttaaattacttgtaagtatggaatatacagactctgttatacaatataatatatactaacatttttattatagatggataggattgataaattattaagccaataatgccataattgttaagaaaatagcatgaggaacataaggtgtaattatattaccatttgcttgtgatgtagaactaattgaagaaacaatattagatgaagatgatgaagtgatagcagatgatatagttgatgatgaatgacttgagattgacgcagttgatgaaggtattgaagaaattctacttgttgaaacaacttgtgatgaagcaattaaatcattattagttattgtcataacatgataatcacttggaactttaaattcagtcatacttaattcattcatataagtacttaaccaatcaaaatttgtaataaatgttgcaaattgatcaaatgggaaactttgaataaataaactagttgcaaaattatcaacttcataagtatttaattgaatataaaattgcattaattcaggtgggaattcaattcctttactttgcattacactttgatatttattattctcttgtaatgcatcaagtaaaactgtattaataaaagtttcttgttcaacaattgcatatgatctttcttcaagtgtatttgttaatgttgtggtaataacatttgctaaaatagatgtaattaatccactgattggtattaatgttgatagcttcatccttgatagtccaagtacattaccattggaaatatattaaatggtggaattactgtttcttttatagaaataatgttaatattacccttttgggacaccaaagaagaattatgaaatttttatttcatttcatttctttttgcaaatggtatctagctattttaatatctatttagggattatataatgataatgataataatattaataatgattaagaaaaagaaaaagaaaagttactcatacacaactaaccacgtaagaaaccttttcttgtcttagttggttgttgttgttgttgttgttgagaatttagtaacattgaagattgttgttgttgttgttgagtatgactaacaccagttgaaccattttgatcaattaatttattatttgattctaattctttctttttatcttctaacattttaatttgttttaataatttatccctcatttctttatgtttactaaataaatcagcttcagtttcttgtaattttttctcttctctattaactttttgttgaaaaatttgtttcatttgattctctaaattaactaattttaattcatgtaattttttttcttcctcttgtttaagaattggatcaaattctttgaaaactgaatcattttgaattatacccattttagttaatttatttaatctataattttcatataatttatttgatgttaaatcttttaaatcttccatataatttctaattaataattgtcttaatttaataaaatcattatgtaattcattatcaatttcaattttaccccaaggatattctctacctctaacaaatctaccatcatctaatttaattaaattatttgaaccaacaattgcaaatggcattttatttaaaatatttaaattttcatcatcttcaatattattatcatcattttcatatttaattggattaaaaatattaatattttgattttttaaatcatttttaatttttaatttaaaattttcaacttcagtttcattaagtatatcagattttgcaataattggaattaaattaactttttcatgaattgatttcataaaattaatatctaaagattttaatgaatgacctgttggttcaataaaatataataaagcatgaattctttcatcaataaaatcatttgataaattatttctattaattttagtttcataatctaaataagaatcaaatcttgaatcaatttcatcaataattggttgaaaagaatttgaattattaataaattcaccaaatcctttacaattaataatttgtaaatttaatttaacattattttcttcaataattgaatttatagtttcaatttgaattttatttaaatcttccaaaggtttaatagttgttaaatcaaataaatctttattaaataatgtattaattaaagttgatttacctaaacctttctcaccaacaatcattaaattaaaattaaaaccttttctaattgattttctatgccattgttttggtaaattagcaaatcctacataaccatttaatttacgtttaatgatttgagtagtatgatcattagaagggagtaattcagccattgttactattcctgttgtcttaaagaaccaataacagatcaagatcaagatcaaaaaggaaaaagtggcaaagaatccaatgtaaacacagtctgaggaaaattgcccatttcgtaataaaataaaattggaaaataaaattaatattacattaaattaaagagacgcgttgtattaatagaggtataatagaggtataatctcttatacacggacaatgtatacaccatcagatagtgttaggaagttagtagaggaaggggcagaatgtatggccaagaaacaatgggaaaatgcagttgatgcgtatagtgaagcatgtcaagtttataatttagagaatggtgatgatagtggtgaattattagttatgtatgcgaaagcattaatagagaatggtattaagaataatgatgttattgctggagagacgggtgaagaagggggagagggggacgaggaagaaggtgaggaagaagaggaggagggtaaatttcaatttttcaatggagttgcagagaaagatggtgaagttgaagaagtagaggaagaagaagttaaagaagaagaagttaaggaagaagctgaaatagatgatggacctaatgattttgaaattgcaatggagatattagaagttgcaaaggaacaatttattaaacatgataataaaatacaaatagctaatgtttatgtattacagggagatatttatttagagacagatcaaggaattgaatcaatgaaaagttatcaagaagcagttaatatattacgtgatgaaaaggatgctattaaacttgcagagacattagttatgttatcaatttcacaagaattaaatggtgaattagagaatgcaataaaatctatgaaagaatgtatttcccttggtaaagaatggaaaagaaaaggtgaaatggaggtacgattagatgagttaagtaatagattaaccattgagagaaaggagaaggaaaaaatgaaagaaatggctaaaagagttgttgaaagtaatgatttaacttcattagttaaaagacgtaaaaaatagcgagtattagacattctttatataacactttctttttgtaatgacttatccacttaatttagaactaccatgggtagagaaatatagaccttatacacttaatgatatagttggtaataaggaaactattaatgccttaaagaatattgctaaagatggtaatttaccacatttaattattagtggattaccaggtattggtaaaactactgcagcattagcattatcaagagatttattaaataatgatgaaaaattaattaaagaagcagttttagaattaaatgcaagtgatgatagaggtattgatattgtacgtaatttaattaaaacatttgcacaaaagaaagttacattaccatataatagacaaaagataattatacttgatgaagcagattcaattaccagtagtgcacaacaagcattaagaagaacaatggaaatttattcaagtagtacaagatttatatttgcatgtaatcaaagtaataaaattattgaaccattacagagtagatgttcaattttaagatttaataaattaggtgatgaagaaattttaaaaattttgaaaagaattttagataatgaaaatattaatactttcactgatgatggattagctgcattagttttcacaagtgatggagatatgagacaaggtattaataatttacaaagtgtttattatggatttaaaatgattaataatgaaaatgtttttaaattagttgatacaccaaatcctattataattaataaaatgattaaaatggcattactaggatcaattgatgaatctatagttatattagattccctaattgaaagaggacattcatgtattgatataattaatatatgttttagagttagtaaaacattacaagaagttgataatgaaacagttttaaaagtgttacgtaagattggtgaatgtcaattgaaaataattgatggtgtaagtacaagattacaattatgtagtttattaagtagtttgtgtagttaagtagagtaatgtccacagtattagagagacttaaggccaaggaagctaagagaaaggagactggagaggataagattagagcagaggcagtgtataggaaaggtataattaaggagagtgagataaggggtatagtgagagatgtagtaagagaattaccacatggtactagtcatataagtgttaaaagacttgtacaaatggttagtgatagtagagatggtaatatagatgttgcagttgttgaaaaagtagttaacaagatgtactctgtatcaatgaatgttgtctctcttgtgtaaagactttattatattaatatagaatattctcgaaaatttactcattttttcactccgatttcgcactttgggaaaaaattccattttttttcccacttttcttataaatgaccaacttcgtccattttatttctatttttcaccattttctattatttgccactttcaattttcatttacgtctcttctttcttttagacaaccccctcttttgataatgctttcatctgtttcaaagaacgctgctactaaaattccttctaactttgttagatataactccaacaaggttcaaggtacagttattggtatcgatttaggtaccaccaattctgctgttgcagttatggaaggtaaaactcctaaaattattgaaaatgctgaaggttcaagaactactccttcagttgttgcattcactaaagatggtgaaagattagttggtattccagctaagagacaagcagttgttaatccagaaaatacccttttcgcaacaaagagattaattggtagaagatttgaagatgctgaagttcaaagagatattaaacaagttccttataaaatcgttaaacattcaaatggtgatgcttgggttgaagcaagaggtgaaaaatattctcctgctcaagttggtggtttcgttcttaataaaatgaaagaaactgctgaagcttacctgggtaaaaaagttacttcagctgttgttactgttccagcttatttcaatgattctcaaagacaagcaactaaagatgcaggtgctattgtcggtttaaacgttgctagagttgttaatgaaccaactgctgctgctttagcttatggtttagaaaaggatgattctaaagttgtcgctgtctttgatttaggtggtggtactttcgatatttccatcttagatattgataatggtgtctttgaagttaaatcaactaatggtgatactcatttaggtggtgaagatttcgatatctctcttgttagatatattgttgatgaatttaaaaaagaatcaaatattgatttacaaaatgatagaatggcaattcaaagaattagagaagcttcagaaaaggctaagattgaattatcttcagctttatcaactgaaatctcattacctttcattactgcagatgcaactggtccaaaacatattaacttaaagatgactagagctcaattagaaaaattagttgaacctttaattaagaaaacttatgaaccatgtaagaaagctcttaaggatgctaacttatcaacttcagatattggtgaagttatccttgttggtggtatgtcaagaatgccaaaagttattgaaactgttaaagaaattttcggtaaagaaccatctaaagctgttaacccagatgaagcagttgcaattggtgctgcaattcaaggtgctgttttatcaggtgaagttaaggatgtcttattattagatgttactccattatctttaggtattgaaactttaggtggtgttttcactagattaattccaagaaatacaactattccaactaagaaatcacaagtcttctcaactgctgcagatggtcaaacttctgttgaaattagagtcttccaaggtgaaagagaattagttagagataataaattaattggtaatttcacattagcaggtattccaccagctccaaagggtgttccacaaattgaagttacatttgatattgatgcagatggtattattaatgtttctgctaaggataaagcttctggtaaagattcatcaattactgttgcaggttcatcaggtttaactgatagtgaaattgaaaagatggttaatgatgcagaaaaattcaaagaacaagatcaagctagaaaggaagcaattgaacaaactaataaagcagatcaattatgtaatgatactgaaaaatcattaactgaatttggtgataaattagataaagcagatgcagaaaatgttaaaaaattaattactgaattaagagatttaattgttaaggttaatggtggtgaaaatgttgaagtttcagaaattaagggtaaatatgaagaattacaacaatcaagtttaaaattatttgaaaaaatgtacaaaaatcaacaatcatctgaagattcatcaaaatctgatgaaccaaagaactaattgtaaataattaatataattaactaatataataatatatatcttgtctataaacaaacaattttatgatgaactgaaataatttataaatttatcaaaatgattaatagtgtaaaccataatactaaacagtaatattactaaaaaattctttcaatttatgattattaggtgtaaatctccaaccaacggttaaagtaatcaaattacttacagttaatttaaaaatatcagtccaatcatagttcatactataaattatctttaaataatccactaaaccatcattatttaaaccaattataaatactgaccaccaaaacattaatgaataatatggtaaattggaattaatattaaaatttgcatatagaataattggaatataactgaatatgaagtaatataattgactaagtagtgattgatccattgatgttctacttaatgtcattgtagttttttggttgtattaagaaaaagcaattagttgaatccttgcagaacaactatacgtcgattggttttacaataaggtttattaatgccttgtgcgtaatcatatacttagataataaacctagtataaggtattaataaaatatggcacttataccatttacattactcgttatgtgaatgttctatcaattcattaaagatataatatttgtccttaagataaagttaaggtatagtaaaataaagcaatttagtcagtaaatttgagaaataatttttcactaagtaagtaataactattaagacaatctttcttttaagacagtgacaaatatgcagaatccattcctaccaccaccttctaaaccattaaatgagatgacaccagaggaacaaggtgaagcaggtgcaaaagaaattatgaattttatatcatcatgtccaggtaaggcaatattagcaggtggttcaggtttcgttcttggaggtgttttcggatttttcatggcatcaatgtcatatgatacaccattaggtattggacaaatgggtggagctgcagctttagctcaagaaaaatatttagaattaccattaaaggaacaaatgaaaattcaatttaaagatgtttggaatagaactaaatcaagtgcacgtaattttggttatattggtttaatattttcaggtgttgaatgttgtattgaaggtttaagaggtaaaagtgatttatataatggtgcagctgcaggttgtataactggtggtggattagcattgaaaagtggacctgaagcagttttagttggttgtgcaggttttgcagctttctcaactgcaattgatatgtatatgagaagtgaaaatggtgctccaccaaagaatgattatgatcaataaagaaccttgtaaccttgagtgaaacgaaatgttattgaaaaggttcgtataggtcttccaagctttacgatgattaatgtataaaaggtataatataatataaatttgtaaatagaatatagagtaggataaataagataatatcatgcaataatactacttctaccttctctctctaatggaggtacagcattaaataaatcttttgaagttggataactacctaacataccctttgagcttgcaaattcatttgatctaattgtattagttgaataatattcatcctcaattggatgcagtaaaatatttaaatttgaaattgaaactgtactattagttggaactgaaatccaatcatttctctcaaatgttaatggttcacttgcaatcattactaaattttgtgatttattcattctttccattttataacgacctggtgaatattcaacaaaatttgatccagttgaaaaatataatgatgcagcttcatcagttttagaattaacatatcttgaaacaactatattaacaccatcagttactgcaaaatttaataatgatggatcattattattactatcaccaccattactaacttctttaacccaatctttaatatattgaatactatcagtaagtgctttccttaaaatatgaatattaacaatttctccactatttggttcaaatccatttaatctaagacaatgtaaaaataatgcaaagcaacattctgaatctgttgatccattaatattaataaataaatcttcatcaataaaattaattaatgtacgtttaatttttgggaaatttgatataccaccattatgcataaacattaaattattaaaagtgaaaggatgacaatttgtttcacttaaaacaccataagttgaagctctaacatgtgcaaatattaattttgaacttgtcttttcactaattctttgtaaattttgattattccaagcaggtgtaattgccttataaagacatggacttgaatgatcatcatcaatataataaccaacaccaaatccatcaccattaactggttgtgcatcaattcttaatcttgaatcatatgattgattaataatagaatgttgaggtctagtaagcagatgagatagagttattggttccttacccttgtatatcaagaaacgacacatattaaaggaagaacaatcatataatataatgttgttaaaaccttcgattagtcacttgcatgaaaaaaaagttaatcttatatattacaaatctttatctatttccactttcctttacttcttttacttcttctgacaatgagtgtgctacgaatagacccggaactggatgatgaaacgttgggtaatactatagagaatgcacatctatggcaatacattagtgatagtgaagatgataaaactattgaagaagaacttacaccaccaaatagtagtagtatatcatttgatgtgagtaccggggattatgcagaatgtttaattaccaaagtatttaagaacaagggatacattaattcaagtaattcaagaactataatggttgcatataaaccaaatgacacgctggacgttgttaaatggacaattaattcaattttaaatgataatgatatattggttgttatagaggttataccattacataattatttaaggactggatttaattataataaagataaagacaatttatttgaatctatgaaatcattaattggtgataaatgtgttgaaatagtatatgagagacgtgttggtgcagtttattatgcaattaatagagcaattaatgattatgaagttacaatggtagttataggtaatggagaatataacaaggaaatgattgataaatgtaaagtaggagttattatcgttaatgatttagaaattagagagaataaggataataataataataataataacttaaagacattaccaactattcaatcattaacatatgctataacttcaacaccattagatttaccaacaaagagaacttcaagattcctaagaggtgggaatcttaataatctattatcaccggtatcatctaatgaaagtatacgatctttatcaccttttaaactattcaaacgaaagtaatttaacgtctatattctataataatatattatatatacttcttctattctttagtgtcataaacgatagtaactggaccatcattaacaatcccaacatccatcattgcaccaaatacaccatctttaacactttcaacacttaatccatcccttaattctttcaagaaagcttcatataattcattagctaaatgacctttctgtgctttatggaaatcaggttttgtacctttcttaatagttgcataaagtgtaaattgtgaaactgataatatttcaccttgaatatcaataattgatttcatccatggtttaccaacccattcagttgatgtaccagctgattgatcaatatcttcaaataatcttaatttaagtattttattagctaatttactaacatctgcaattgtatcttcctgtgtaataccaacaagtaaacataatcctttaccaatactagacactacagcattgtctactgtcacagaggcactcttaactctttgaataacaactctcattgtataaaaagagtataaaaagagtatatatacaagcttatataccttacttaatagtgataagtggaaaaagtgaaaattttcattttcattgttatttattatctaaaatcttccattggacgattaccattttctttctttaaagtactattctatactatatcatataatacagctaatgatgtctgatcgtcgtccatctattgttgaaagaagaccttcatctgcattatcttcaagacgtccttccattatacctcaattagaagggattgaaaaacctaatactccgaatttaccggagaatatgaatgttgatgttttaatttgtggtacaggtttaattaattcaatattagcagctgcattatcttggcaaggtacatctgttttacatatagattcaaatccttattatggagatgattcagcaactttaacaattgaacaaattaaaaattggtttattggttcaaaatttaataaaacaggttttaaaaattataaaaatattcatttatatattaatgataatgattttaatattgtatcaaaagattatggtattgatttatcacctaaaatattattcccacgttcttcattattagatttattaattaaatcaagagtttatcattatttagaatttcaaagtttatcaaattttcatacttttgaaaataataatttaggtaaattaaatgcaaataaggaagatattttcacatcaaatgaaattgatttaaattctaaacgtaaattaatgaaatttttaaaatttatttcatctccagttattgaattacctgataatttaccaaaggatataagtattcaaaattttctgaaaaaaaattttaaacttgatgataaattaattaatgaaattattttcaccttaggattaattaataatcctaaaattcaattaattgatgcattaaataaaattaagagatatattttatcatttaatatttatggtaatttcccaacattatattcaaaatttggtggaccaggtgaaatttctcaaggattttgtagatcagcagccgttgcaggtacaatttacaaattaaatactaaattaaaatcttatgattttgaaaataaaactgcaatacttaatgatggatcaaatattaaaattaatgaaagaattatttcaagtttaaatcaatcaattaataaacctgaaaattgtaaattttatgaaatttcaagaattattgcaattgttgataaatcatgtaatgaatggtttcaagatggtgaatcatcatcaattataattttcccaccaaattcattaaattcacaaaatgaatatcctgtacaatgtttaataatgggtagtgaaactggttgttgtcctaaaggtagatcaatttggtatttacatacaattgcaccaacaattaatgatattgcaattaatgatttaaattcagcattattaaaattagaggaaaattatattagagagagtacatttaattttaatgaatttaatgatgatgatttaaattattataataataataaaccaattttaacagagagtggatcaatgaaattaagtaaaagtttacttgattttaaatttaaattttcaaatgaacgtattaattatttaatgaaattaagttttacacaattaacaaatattgatcaattaaatcctgaaaatattaatggatataataaagaaatattgaaaactgataataatattataattgttaatatgccatcaagtgaattatcatatgatggtatagttgaagaggcaaagaaaatttataaagagattgttggtgatgattctgattttttcaatgttgattttgaggatgaagaagaagagattgaaattagtaatgaattagatgctgaaataaaggcagaagtagaagaggttattaatgttaataataatcaaactactcaatctaatcaaccaagtgaagaatttgaaatggaattagagagttagtattgtgtataagtgtataaaataatattaaattaaatgtatgaatttttgataaagattaagattattaattaaacttataatatataaattaatatacatgtagatacattatttaaccttgtaaagattctaaaagaatgtttctttcttcagtatctgcaccccatttagtgacaacgacacaagaagcaccgacaacttttctagcattaccttctctatcaacttgacataaacctgcccattcacctaattgtttagcatcagaaactttaattaatggaactttttcatcaccattacataaagcttcaactaaagttgagataccttcttcagtaacagcatcacaaagaacacataattgagcttcacctctagttaaagctttagttgcttctcttaaacctcttgctaaaccatcttgaactaaagcagttcttaaaacttttttaatacaatcttctaaggtaactgaagtttcttcttcaacgacaacttcttcttcgacaataactggttgttcttcaatatcagacatgtttatgtatacttcttcctcagataaatccggtcagttgataaattagaaaggaaattaaaatatctaaaatattcaatcttcagatataacaaatattatgaaaaattcatgtaagtaaaccaatatagtaattatctcaaagtgaggaaatttgaaaattttgtaaaacttttcactgtcacaaaaaacttcccaattgggaaagtacgtgtaaccctctctcacgtgactttaacacaaacccttgtgtgtgccacgtgatatggtttattattatagtattattattatattttattattattattatcaacatctcacaacatgaaagataaagatcagttaaggtaatgtaaacattaacatttgtttattcttaaatcaatcagtcaatcaatcatttaacttctatatataccccctcactatgaccaaaataactatacatcacggcattaaaccaacttcatttaagaataaatcaatccaacaaaaatggtttgatacattaataggacttttctattatggttcagtatccccacttttaactaaacttgaaaattgtgtttgctttttattatttttaataattgctttcctaattataattggttgtaaaaattatatttggccattagttagtgtaataaaattatgagtgctttctataaaatttttatattttatttatttatttaaatacataaaattttctatttctatatattatttaaaatatttgttaatgtttctttatcagaatttgttaattcattaaatgttaaattatatttatcaatttcatttgtttgaatatttataataaatgatttaaattgttcaaatatattaatcttatctaaactattattagaatatggatcatcaactaattcatcaatttcatcaaatgaaaatttattatttgcatcaaatgaatactcaaatccttcatcatcttcatcttcatcaaagtctttaccttcatcaccttcaccatcatcatcgtcatctcctgcttcattaattttatatgttaattcattctcccaattcttatcagtatattcttcccttctcttttcaagttctttaatagctgttggtattttaaataagtaaatttgataaattattaccacatgttgataatatatttgttaacatcatattatttaatgaatttaaatcaatacttaaaattgaaatatatcctaaaattgataatttcatatcgaaaactcttttaaaattatttgtaaaattaaaccatttagttaagaaatattcaattgaattatcttcaattaattttttcattgttgtatttggatcaattataattgatgatataattgtatttaataattgaattttaaaatttatacctttttcatttaatttattatcaatttttttcaaatatcttatactatatgatataataattggtaaatatttaccactaattgaattatttaatgataatataaatgttgttgttaaatcacaaatattaccaatatcactaaatccaattatatcatcatcaaattcatcttcttcattagaattatcacccatttggaaaactgttaaaataatcttaaaaaataattcttgaatttcattattattttgaaaaatttcacctccataaattaaataatttttcaatgctggtaatgaatcttctaaatataatgtaatatcttcatcatttaataatgtattaataaaattatttaataatgaccacataattggtgatactttccttgttaaaaataatgtattttcaattaattcacctgcctcggcataaaaatcttcaattttattatcaaatataattttaattactttactataataaatttctaatttatcaattatttcagttgaattttcaaaatataataaaattgtaatcattgtatttaaaatacctaaagcagttgaagttttatcacttgttaaattttcaaattcatcataatcataatcttcatttgaattaacattatttgtaatttcattaattgaatttaataatgtaattaattttaaacttaattgttccattaattgttctgcaaatggttctaattgttcagggaatgattcaactaattcttgcataacacttggtaatatatcactatcaaatttatttgataaattcattaatttttccattaattttaaaacataacctgaaattaattttttaaattcttcattaacaataaatgtttgaattgataatgcactttgaatttcaattggtaaatgattattttcattattcaaaaaattattaattataccattgaaaatattattaattgtttcaaaattttttaaatcaagtgaatcaaattttgaaattaaattacatgttcttgcccttaaaaatgaaaatttgattggaaatttggtattatataattattcaaaaatggttcaacttcattatatacaggatttttaacttgtgataatttatatgaaattggtgataaaaatttcattaaactttccttacccttagcaatttcaattgtctcagtttgattatttaattcattaaatttatttataacaaattgaaacattggaactaaataatcaactcttttttcaactaatgtgaaaaaaaatgaatgtaatgcatcttcaccagtattttcatccataatatcaaatattttatgaatatattcctctggttcatcttcaaataattccaaatcttcatctgttggattgaaaattttaaaggatacattaccaataattaattcaaaatgtggttcaattaatttaaatgtatctttttttaataaacattgttctaaaaattcaattaaataataaatatttgaatttgataaatatttaccattaccattggagccatcggttgaccaatttttcaaattttcaatataaacattgattaaatttggtaaaacattttctttaaaagtatgtctaaattcagaataatcaaattttgatgaaagtgattttgtaccatatctttgaaataatctatataaattatgataacaccatttttgtgatttaatccaaccaggtaatgaatcttcattaaaattagtattaataacattaacttggaaagtaatccaatcaactaataattgagttgattgtaattgtaatgggaaatccaaataagtgacaaatttataacatttaattattaattttaaaatttctgaacattcaaatgatgaaattaaattttgataattatttaaaatttgattaccaatattaagaataattgggaaaaaaattattaataattggatctaaagttgatgatctctcttgatttgatctccatctaaaatttctacaaatttcagtaaatgaataaattccaatatataaattattaattgaaatttgattttctaataaattatttgaaattaaatcattaatatgatttaataattcaggccaatttttaggataatcatatttaataattaatgataatgcaggtaataattgatttcttaaatttttatctaatttagttataataactaataatctttcccttataattggtctctcatcagtatctataagtttaccaacagtccaatttctcaatattatatttttcaaatagatagaacatgaagttttaacaattggttgaacatttccatttgaaattatatctaaacaagcacttgaaaatccaatttccccactgaaagccttaagttgagtctcactttgacctctaatattaggatcggcctgtaaagaccctaggaaacactcatgcaacctctcaacgtccatccttgcctaaaagaaagccttttcgaagagaaaacctagctgagcaagctgagcaagctgagcatttcatgaaaagcagtgaaaaaaggcaaaaattaaaaaaattgcaaaatctgtgcaccctcataaaatttcccttcttcatgaatttatcacctatttcccctcttgtatctcttgtttaagtataatatatatctcttctttaggacaaacaatacaatacaatgccattcttagttacttatagaccggcagtcttactcttcttctttatcagacaacccgttgctgctgcttccattgttggaatgtttgctctttgggaagctgatagaaatttaggtttaggtataagagattctttcaatgaatggagacaaaatcaattaggttttgcaactgttactacacaatatgaagcttttaagagaatagatgaagctaaaagaaatgaaatgttacttaaacaataagtaatttctcaatatttatttatttaacctaaatacacactttatatcatattattagccaaaaaaaacgattcattatttacaagtaataataataataatacactttatacaaatctctctttataaacctccctttttacttattctgtaaagttcaaaaattgcagcaggtgtaataccttgaattctacgtgcttgcccaatactttcaggtctattctcatttaatttacttataacttcacttgataatgatggtatattcctataatcgaaattatttggtaatttcatattctcatctgccttgaaagcctttatatattccttctcctttttaatatatccttcataattaccttcaactgttattttcatcttaattctatcatttaattcatcatttaatttagaatcatcaataattttcaataattcattaattgatgatcctttataccttaatatctcatatgcagattttaatttggaatcattaccaatattaatatcaggtaataaattattccatttactactacttaatttaaacttctcttaatttattcattccatcattcataatttttttatcattactaaaactttcccatctttcatcactaatacaatttaatttcttacccatttcagttaatcttaaatcagcattatctgctctaacactaactctaaattcagatcttgatgtaaacattctataaggttcctcaactcccttagtaattaaatcatcaattaaaactccaatatatccatcacttctatctaatattaattgctctccattacctctctcacttaatcctgcattaatacctgcaattataccttgacttgcagcttcctcatatccagttgtaccattaatttgtccagctaaataaagtcctgaaattaatttagtctctaatgtacttttcaattcccttggatcaatataatcatattcaactccatatgcaggttttaacattttaacattttctaaacctgtaatattctttaaaatctcatattgaatatcttcaggcattgtcattgatataccattaggataaattatatcatttttaaccatatctaaactttcaggttcaagccaaactctatgttgtaatttatctgaaaatcttgtaattttagcctctaatgatggacaatatcttggacctttaacagtttcccttatatggaaagttttatctaaattattcataattaattctttaacttttggtgttgtataagttccataacataatatttgatctttaatacttggtctttcattaagaaaactcattggttcaggtggattatcacctatttctttactaactaaattataatcaattgatttaccactaattctaggtggagtaccagttttcaatctacccattaaaaatccaatttttttaaaagttttacttaatccaaaacttgaaatttcatcaattctacctgctttccaagatttcaaaccaatatgaatttcaccatctaaaaatgtccccgtagttataacaactttatcacatctaattaatgtaccatcagttaatacaacacctttcaccacacctctatttctacctaattgatcattattttcatcataatcaataattaaatcttcaattttcccctcaattatatttaaattcttataacctttaataaacttttgcatttccattgaatataaatctctatcaatttgagctctatacccccaaactgctgcacctcttgacctatttaaaattttaaattgaatacctgctttatcaacaattctaccaacaataccatctaatgcatcaatttcctttaataatgtaccttttccgatgcctcccaaatgcaggattacaactagttgcaccaatattatcccatttaggggtaattagagcagttttaataccacatctagcactacccgttgatgcttcaatacctgcatgcccacctccaacaactataactggatgatagatagattttgataacttattggatatatctaaatcataatgtaatgatcttttaaatatcttacttaacataatgttgatggttagtgatgaatcaatgattaataagataaaagttaccaaattgagtgaaaaattttataatttttttgataatccatgtttatagttacgtaatgatatcttacaggtttatcatgtattgtattaactgtgtttattgtattttaagagaatatgtatgtagttaattaatcacgagtatgatgaatagtgtctgtagtgtcaatggtttattttttagtaaattttgtaattttaaataaaattatgttactagactttgtaatatttcttaatttgttgaaattattgttcataattgtgcaactataatcaatatttatcattttttacctctattttacaccagataacagttttattcagatagagtaagtgtcaattagtactatagacagtgaattacctttgagtaataaaatttgcatgtggtttcatgaacaaattctaaatatcatgacaataaaacatgttgtagtagataatagcgaaaatagataaggatataatagaaatacttcttctatactatgtaggtttataatataactgtttattatttatatacaagagtaataatatagaatgtataaatgtataaaagataattaaattaaattaaattaatcaaatcaattaaattaataaaacttctcaccttgatcaacaaacataccattaaatccttcatcacttggtaatttagtatctaaaggtttatataaataccaagcttttaaagctttattaaaagatttaattctagcttctcttaatgaacaaccttcagcagttgataataaattttcaccactaaagcaaccaacaacatagacaggagttgaagataatctaccagtttctgaaattaatttaacgactggaggttgtaaattatttgattttaaaatttttgttaataatttaccactttccttaaattgaaataatgattcaatatcaatttgtcttgataatatatgattattaataaaattttttattattaaatcattattatttgaatgaatatataaacctgcaattattgaacgtacagaatttgcataagcttcagcttttgataattcaaaagtatttgaattttgatcatttgaatatttagtaacattaatttcaggatttgttactttacgtatatatcttaatttaccaaatttgaaaatttctggttcatttgataaatatttatctaattttgaagttaaatcttcttcaataccccaattatttttagctaaatcatataatgaaaaatctccaatatatgagtcaattgccgattttaaaattgaaattggtaatcttggataatttgtcattaaatattctgatatataaaatgataaaatatgagaacctaagattgataattgttgattattagaagataaatttgaaaattcattagttggacaagttaatgatttaactaatgtattaaaaggataattttttggtaaatttaatcttgcatgtaatgcaactattgaaggtattaattttgcttcatcatttgaaagaagtgatatactactactactactattattattattataatttgagaaatctaatttattttcaggtaatgataaattattttgattaatttgtttattctttgcattttcataagagaatttgaatttatgattaactgaattattatttaaattattattaatagtattgattttagaaattgcaggagatattgaaataaatctctttgcaatatggatagaagaacgattagatgcaagcatgtcctctattagtttaatattacttctactactaacttcaatgaaaattccatgataatatattccaacaaagtgaaaaaaagtgaaaattaaaaaaaaaatggacatccctaagagaaataagatagacgcatcgacgcaacgtaaaacacagacgcgtcgagtgggcgaatattctattttttcaattacttattctttcattggtaattagaagaggggatctcatattaaatttgttaacatgaatttattataatgtaaaggtatattgtattcctatagaaatcttttcataagaacaactatgtcacatcctcaatttattcctaaatgggttacacctccaactggtggttggtttcatactcctaaaaatcatcatgctaatggtataatagcatttgcaggtttctttgcaatactttatggtttttataaacaagctgaaaaaaatacaattaatccaaaggaagcttattcaatggaaactgttgctaaatgggaattagctgcaaagaaataaattattctctttatatacttatacttatttattaatatacataaacttttaaattaggattcttatctttaatttttttaattaattcaaatgtttcacaataatctaaaacactacgtaattttgaatcaatataattatctaaaataattgtatcaatttcctcttcctttaatgttaatccatcttcaaaatttctttcaacatcatttttacttatctctaaaattttatcaattctttcaactgttgaatttaaaattctactccatgttgtctttaacatttttaaatcttgtccaattggatttttattaattaatttaactgatccaccttctaaatctcttgttgctctatgaacatcacatgatctaattgctgaaattgataatattaatataaattttcttggtggaatttcaactgtcttgttgaattttttattaaatttcttcttcgtttcaaatttcttaatcttatttcttaatcttttatattctttaatacttggaattaattctttcataaaagtttcaataaaattacttaaatttgttaaatttttttctttattgtattcactcgtatcaataacattctccttcttaagataataatcacttaattctaatggtgataaatttgggaaaatttcacgaattttactacttatcttttcaacaattatatcattcttttcattacttaaagatttcttattctctttctcaaattccatcttttgtttcttttgtgatttactttcttcacttttgttttttctctttttaccaacaactattgtagtatcttcagtagtatcttcagtagtttcttttggagactcctcctcttcttcaatttcaacaccttcttcatcatcacttaatttataatcaacagcaagtccatcatctaatccttcaacatcttcaactttattcttcttttctgcaacagtcatctttgtcttacaaaaaagaaaagaaaagaaaagaaatctagtaaaaaaagattaaaaatatttttcaatgaattaaaaaaaaaataatttttatttttctacacaataatagaaaaacacggtattcaaccacaacaatctcttatcaaccaatgatatcacaatccccacaacgaccaacaactccacattcaccacataccccaagatcccctcgatctccaagaaccccaaggaaatctttaactccattaactaaaagagcattggaaatgtcagtaactccaataaggaatagattgttattaacaccaactaggaataatttaaataaaatttataatccaattgatgatttaaaattacttggtcaattatttaatatagataaaaaaaagacagagactactaaaattatttcaccaccaaagatttcaccacttaaagtttcaccacctaaaattgtatcaccgaaagtcatcactaatataccaagttttgttaataaagatgtaagtaaatttgctagaaattattcaagtagttttaatgataaattatcatctgatattgatattgaatcatcagaaatatctatggttattgatgatacattaccaataactcaatcacaatcacaatcacaacaaatccccgaatataatgaacctgaatatgaatatgaggaagaggagatagatactacatttgaaaaaactgtaaatacatcgaatttagcattaccagaagcaataatacgagatagatcaggtatttatggagtttccgatgaggaagaagatgaagatgaagacgaagaggaagacatacccagtgagattagtgattatgaaatggatattgatattgatccggtaccgataccatcaattgacaactcctttactatccaaccaataaaaccatcatcaaaaccaccacaatttactaattcaacaataaagaaattatttacatcattacaaattaaagaaaataatatacccttagaattatttaatgaattaactaataaatttattgatatggaaataatgggaagtatagaaacatcagaaaatttaggatttggtaatagattaatgattgatacagaaaatattgataatattttcttagaagctataaatgaatgtgatttagaaattgtacgtgatttagagagtttattatattctaataaatcaatacgtcgtagtaagagtaaagttaataaaccaatgaataaggaattatctataagtattggaattgaagcagatagtgattctgatgaatcaattgattataggataccattagaggaagaagagagtgatgtaagtgtatattagatagatagatatagatattacgtaacaaatcaagaaattggacgttcaatgtcaatgtcatgtcatgtcatgatgcatgcatgttctttctttacggacaatgacagattatagtaatttattaccagtatccacacaatggaaacaatccataactgatttccttacagaggatattccatcatttgattatggaggatttgtagttggtagtgaaattaagaatgcatcaatttatatgaaatcaagtggaattatttgtggtataccatttattgaagaagttttcaaacaatgtgaaattaatattaaatggcatcataaagagggtgaatatattaaaattaacaaaggtgaaaaaaaatgtattggttcaattactggtaaatcaaagaatattttacaagctgagagagtttcacttaatttattatcaagattatcaggtattgcaagtaaaagtaatgaaataattactaaggcaagagaagttggctatagggggattattgcaggtactagaaagacaacacctggattaagaattatggaaaaatatgcaatgttagttggaggttgtgatatgcatagatttgatttatcaagtatgattatgttaaaggataatcatatttggtcaacaggatcaattacaaatgctataaataatgcaaggaaagttggaggattttcaattaaaattgaaattgaagttagaaatttaaatgaagcaattgaagcaattaatgcaggtggtgatataattatgttagataatttccaatcaaatgaattaccaattgttgctaaaaatttaaaggaaatgtttaaagataagaatgacaaacaatttttacttgaatgtagtggtggattaacaattgataatattggtgattatttatgtaatgatattgatatttattcaacaagtagtattcatcaaggtacaccaattgttgattatagtttaaaaattgataaatagaatatatatatatatagtactaaataaagacatttttttattttggtaattgttcttgttttgcttgttgttccttttgcttttgctttgcaacaacataaactaaaccagctgagaaacctaagaaaattgatgaaattgaaaagaaattaattggagcatcaaagaagattaaacctgataatgcaattggtaatttatttaatgcaccaaccattgaataagtagttgaagatgtaactctaatacaccaacctgaacaataagaaataccaacagaagttgcacctgaaataatcattgctaaccaaacacttaatcttgcctcaggtgggaaatttaaagttaatattttcagttgaccaatcttctaataaaagtgaagaaattaataaaattggaattgataataaattattataatacattgtatcaaaatctttaaaattagttaatttaattctttttctcatgaaaagaacaaatgaagcagaggagaaacaatttaatgccatccaaaaataaccaatattaaaattagatgtaccagtagttgaatcaacatcaccataagttgcaacaactgatgagaaaaccattaaaataaatgaagataatgccattgatgtaacttcaccaccaaaccataaaacttcaccataagcaattaaaataattgttaaatttttaaaaattgtataaattggaattgataaaaattttaatgctttagatgaagtataaatcattaaaactaaaaggaaagcaattggtgaccattttttcgcttcattaatattaaattgtctataagttataacaccgaaaaattttaaagttgcaattgcaattatacaaacaattgattgaattgctaaaaggaagaaattcaagttaaaatgatgaccagagacaacatatttattagttgttgtcattaaaattgaggaagcacaataacataaaattgagacaggaccagaattaactaatttagctaattgagaaggttgatgagatgaaacaattggagtttcatttacgacagactctttcttttcacttgacatggttgcttaaagagagagagagagtatgataaaagaggaaataattaattaaaaacagcaaagaagaaacaacacataaacaactgcaataaaataaaatgaaaacaaatcagttgctgcttaattgaaataatgaaaaaagcagagaaaatggacaacgcgaaattattaggaattttatagcgtgtatagaggtttaattattattattatcattgtctataggttaagacagttagataatttatatttatatttatatatgccggtttataacaatttgaacttcagggaagataaaggggatgatgggtttgttgttatgaaacctattaagagaaattcaaattctaaagtaagtaaatcggataaaccactaccaattgctaaacgtaaaaaggttaaaatcaataatcatacacttgataaagctgtaggaaatgatggattcattgtaatgacacctacagtcctgtacctacacctacaagctaaagaaaccaaatcttctaatgttaagaatcgtccaatgaaaattatgcaatgtgatggacaaggaaattctaatgataattctatatcaaatacatctcctataatcactgatagggaattacaaattattcttgatgttgaaagaaatgaaatggaaaccagaaatattatgaataatgagaatgttgatgaagatgtgaattcacttactgaaattgagttacgtttactcaatccaaatcttcatgaaattagctattcattttaaaaagtactatgataagatcatttctcattttaattcacctcaagatgaaaggaatgtcattggttttaacatttaatcattatatgagaagatattcttcaacagattcaccgaatgcagatttaattgattggttctataacattttagagattaattctggttaccttacctgcaatatggattttcttgaacttggttattttaaagaagtatttaaaactttttcaaatccaaattatttgaaaactgctaggtatagtagattatatggtaatgaaccatataaaattcacaagaattttgaacaacatttgttaatgagttacaaaatagatctaattatcagaatagttattttgatatgatgtatttttctgggaaagattacccctggttttatgagagaacctatttctgtgaaaagaaatatgacaattgatgatgttaaaccattaacacaagaaatgattgatgaaaaaatcgatgaaactcaatcttttctttctttgatttatatatttagagaagcagtaaagaaatttcgtttaaaatttaatattactataccagtcgaccatatagaaaataaattggattgtgataatgatgatgatgatgatgatttggatttaccagatgaagttataaaactgtttcttgccgatgaagaaatatctgaagattttaagacaattctgagggaggaattagcaaagaaaaaaccagttaaagaataattaggatcgattttatattgtagatactgttattaattatattatattatatactaaactatacaatcatttcactgatagctgtccaccgcaacgtctcatatataaagatacagttacaaaaatgtaagaacttgatcttatacacggtacgcctagagtgtgattgcatatacgtaaatattatactatatttaatttggaacagacatagtaatttcaacatcaacacctggttcaatagttaaagcagtaatatttttaactaatgaagatggagcttctaaatcaacatatcttttatgaattctcatttcataatgttcccaagttttagaaccttcaccatttggagtttttctagttgcaattgataatgctttagttggcattctaactggacctttctttgcaacattaaatttaactgcatttctaataattgatgatgaaactttttctaatgctttaacattagttgaagttaaagtaattctaattttagaaatttgttgtggttgttcaatatctttcttttcttcagacatagttatttgttaagagacgttgtcaagttggtaaaggaaataaaggtataataagaaatcgaagacattaatactaatactaatactaatactaataatattaagcaagtgaaaaatttcaaattttaaatttcaaaaattttattcgcgtctatttattataaagaaaaaagggttagctagccctcctacacatcacgtgtgcattacgtaatattagacattattattgatatttaaaacactgtaccatcacctaataattcaattggtggacctccattacttcttaatttactggcaattattctgcctgatttccaactacctgcctcaattaattgtggtaatgataattcatatttactacctttaatacccattttttcattaataattggtaataagtaatctaataaattaattgtaattgatctccattcaataattacatcatcatcaggtttaaatactggtatattatttaatcctaatatttgattacctaatttaataccattttgattatgttcattatcctttaaagaaattacattaaaatcaataaataatcctccattacgatattctggtaatcctgtcatatattgactattaagaattttaaatttaccaaattcaattaatggtttaaataatgaatatgttaaccattgtgttaatttatgaaatgtaacaattttatcatttttattctttaatggccatgcatctccaattaaataattatcaatcttagtacgaccttcacttggccaaattggtattaataatttcattaatacatcccataaaatttcaatttcaatatttttaccctcatcacaatgtaaattaagataatcaactaaatcacctggtctattagatttgaaaatttcatcatcattaactaatgtttcacctaatttatttaataattttaatctaccttcaaatccattaatcggattcatttcactaatttgtaatccatcacttaattcctttcctgttaatttacttaatttatttaccatcaactctatatttatcatcaccattttcattatttgaaaaaactccattaataaacatatggaaagttgcaattgcaataccttcagatctattaaataacaatccactctttttttcaatatatttccaattattacctgcacctgcatctaaaagtacactaataacaaataaatcaattaattttttacagatttcttcatcatttaatcccatttttttcttaaattcattattaattaaatcaggtaatctattttcattacctttattaaaatgttgaaatctaccatgaattggaattgttaataaagagtcatttgttgggtaagttgatttaattgtttcaataacaaaattaacaacattatcaatattatttaaattaacattaaaattaattaatttattatttttaattaattcaagtgttgataaatttgtctctctaactgatttaatactatataagtatttaatttcctctggtattgtcattgtcctgtgaagaacataactttttgttgaaaaaggatacttatcagttttatttataggaggatttactgataagacggagttatacggttatcgacgggggtgtcggaaaatgtgaggggttttagacttcaactttaaatttccgaagagatacatgaatttttccagtttctctgagagagaggttattctgtataggattgattttagacaatgataagaaataccatacgatatagttctaatgttagagatttaactaaaacagtaccattgagattattaggatttcctaaaaaattagatatagaaagattaaataaattaaataaaaataaaagtcaaataattactaattatcaattaagtaatgaagataggaataaaataattgattttttaaatgaaactattagtgaatatccattaaatataatattgagtaataaaaataatgttttcgggtttagtgttaaagaaatggatgatgaagttaggaaaataaataggtatggagatgtaaatagtgatattaatgaaattgaaaaaataattgattataaagtaattgatgaagaattaaatccaatgttgtttaatatctttaaagattattataatgttattaatttagacaaaataattgaagatggtatagagataaaatatcgtaaaattatgattatttcaataactgaaaaatttatgaataataataaagaatttttaaaatcattaaaggaaaaatattacaatattaaaataaatgcatgtatccttaatccacatattttcccatttttgaaaaatattagtaaagtaaaggaagatatatcaagtgaaaatttatataatattgcaagatatggattagttaaagttaatcaacataataatggaagtttaatacttacaaagaaaactatataaatttattgaccgttaatatatttagctatatcctcagcaacactacttgaagcagttttagcatttgattcaaaagcttgttgatatctatcacgtatacttttagcaacatcatttgaattttcattatctcttaattcaccatttctatcctcaggaaaagtatattctctttctgaagattctaaatctattaaaccatgttcataaccatttttttcatcattttcaatttcttcctcaatatcagatattacctctacattatcatcattgctttctttctttttatctttaatacctaaatctttcattaaattattaagttgattatcctttttaattttttccttttctttcttttcatttataattctttccctttccttttgataaaattcattatattcatcaacttttttatcaacaatttccataaattcatcaaatccattaccattataagatgaaacaccaacaatatctaaagttgaataaaattcttctaacattaaactcattgaattaattaaacttgccatataacctgaaccatttgaagtttcatcatttaattcactattatctcttaaactatcttggaaactttcaaaatctttcatccaatttttagcaaaattttcatttcttaaatcatttttattgaaaactataatcattggtaatttagttttatataaaattgaacaagcataaagcatatttgacataaaagttgttggatttgaacatcttggagtatcaattatataagctaaaatagttgggaattcagttgcaaaactttcagttataattgaacctgaagcactccaaataaaacattcaatttgaccaggagtatcaattatacaattattaaaattttcactcctatttttaacaattgataaaactttatcaatttttgtactaaataaatttaatgaagtaacaattgcaccatttggacctaaattataattttccattacttttttataattaattgaatctcttatatcaatattacaattaaaaggaattttataaactgctggatctaaatttattacatatggaggtttattattttcatgtaaatgagaatttaatctttgcataaaagtagttttaccagaaccggccattccaatacatataatagttgcaggcatattgattgtgagattgattgtttgatgatttatgtttttaatatataagtattcttttctttactgattactaagtatactgaaaatttacatgttaattaaaataaaaataaaaataaaaatttaatctcggaaaattagaaaaattataaaaaatttaaacctaaaattccgacataaatccaccgacgcgtctatacaaaaacaaaatcacgtgaccagggtaaacccgatatatccgaaacccgacaaaatgcattacgtaatcaaacaattgcttgatgacataagcaaaagaaaataaataattttccaatttaataataatgacatggtatagaaatacagcttaatattggtattaagagttgaaattttataatagaatacaatactggacaataaacatggataatccactgcatatacctgtacagatgtactatcaacaacaagattttattaatgatccaacatctcatataaattcattaaataataataataatattcaaaataatagtattcaaaataccattcaaaatacaaacactaatatagataataaacaaactgatagtatagaatcaaatcataataatatacagtcacaatcagataatattattaataaccaaaataatcaaaataatgattcatataatcaacaaatagaacatagtttagatgaagaaattataacggaaaataatgattctaataattcacaatcacaattacaatcacaaactcaaacaacaactccatcatatcaaccttattatgttaatgcaaaacaatatcatagaatacttaaaagacgtatagctagggcaaaattagaggaaaatttgaaaattcaaagagttaggaaaccttatttacatgaatcaagacataaacatgcaatgagaagaccaagaggtcaaggtggtagatttttaactgctgctgaaattgctgaattagagaaaaaagaagcagaaggggaggaagatgaacaaaaggaaattaaaaatgataatatagttattaaacaagaaattcaggataataaagatgataatactactaatactactaataataatatattgaatatatagctggactaaattactatataatatataaaatatacttctattaaatcattgaattaattatttccttacattgaggatctaattgattaattaattcattaagataattattattaattttcgttaaatttaatttaaaaaattcaattaacatatttttattatttataattttattcaatggatcaaatgatttaatttgaattattgttaatttattaaaatttgaattaaataatgaaatttcttcattttcaatctcttttaaaatttcatcattttcattaatattcttataatttaaaattgattcactatttaataagtttaaaatttcacttaaaatttttaaaatttctaaatcattaattttaaaattatttggtgatatagaattataactattattattaacaatcatattagttaatccaacaactaataatttcttatcagttaaattattaatcttattaatattaattataataaaattatttaaaatttgttcaaataatccaatttgaatattctcaaaaattttaataatcatatcactattccatttattcttattataatcaattccatcactattactacttcctatactctctaaacttgacattttacttaaaaatataataaatcttttaataaatttatcagttttaaaatttttcaatcttgttaataaaataatgaaaatttcatttaaatatttatttaaatattgaatatcaatgaaaattaaaattgtctctaaaatttcaaatcctaaatgatcattaacttttgaacttaataatttttgataaatacctaaaattggtgtaatattttcatcattattaaataaatttggtttaaatttaattattgaacttaataatctttgaattgcaggtatattacctttaaattcccaaacttgtggtgaacacaatggtttaattaattgttcatattcaattggaatttcaacattttgaggatatttctctaaaatatatgataaaatttgaaatgaatatggtataaattcttgaatatcttgtcctaatatattaaataatgaattcttcaaaatttcataaaattgtattatattttgattattattctttaatataatacaaatacattcaaatgtataatgagaaaattttggattcgaaggatttttagaaataatttcaattatcttaattaactcatttaaaatttgtaaaattgaattattatctaataaatcttcacttataattaaaattctcataatacatttcattaaaaattcattctctgataatttttcaggtgttaaacccattttaaaaattaatttaaataattcaattaataaattattaataatttcagttgataaatcatttttattaaataacatttcatcatttttattaggatttcttaatgataaaattttttcaattgtaattgatgtgaaagtattaactgtataatttaaattattaaaattatttgttaataatggtaaagtttctaataattgatttttagttaattgatttctaaaaatatataaatatttaattgaatcaacttttaaaattggattaattgattcattattaattaaatctggataaataaattcattaaaaaatttaattatatcaactaataaattagtacttgtaataccattagaatttgtaattgaaccatttgatgcaattgaacaaaataaataaattgaaatatctttaaatttccaattattaattttatcattattatataatgataaatattgattaatataattcattaccatattagtaattaaattttcatttaattcctttaatgattttaaaaattcagttgcacttcttctacgattattaatatctgaaccttctaaatctcttcttgtatattcaattggatcatcttcaaataattctaaatcactttctctaattgtaatatttggtaaaataattttttcaataatttgtttaatattatcttcattattaataaataaattattataggatgataaattaacaatacttgtcataaattgtaataatttagaaactaataaatcattctttggttgaattgttatattattaagtaaattccaaataatttcaattgaaggttcaataaatttatgaaattcttcttcatatcttgttgtatataattgaattaattcaactatattaattttaacttgaataactaaattagtttcatcatcttcatcatcatcttctaataatttattatgaaatttcaaatattttaataatatattaataccagtattcatattatcttcaaaaaattcaggtatatcttgacaatttaaatcataataaattttaactaataaatttaaattttcaaataagatttttaaattatcaatattatttaaattttcatcaattaatttatcaatattttgtaacatactcataaatggtatagaaaatttatctaaaaccattttaatctctaaaaataattcatcacttctaaataatggtctccatcttttaaaaattgaatgtgcaacttttaaaacacctttattaataattaaatcatccattgataatttttcaactaattcatcaattaatgttgaccataattgaggaaattcactctcagctataagactaattgattcaccaatttgtaattgtaatgaatctggtaatataatcattaatgaaataatttcctttttaatcatttcaacatcattaatactaattaaatattgcccattttcattaatccatttacgtttaattaaattcttgaaatataatgcacctgccaatctagtggaattggcaatttctccattggcaactatatgtaacaatgtgattgggaaaccttcctctgtttccattgatttgagaacattctccgcctgtttggcagtagcaggttgcagggactgttcaagtataggcacaaccttctccattgtcgatgtaaaacaaagcaaaggaaatccaaaaggaaaagaagaagaagtacctgaaactgaaaaaacatgtctgaaaattttaaatttatcctcactataaatattgtgatgagtctcttttactttactttacttacttactttactttactttactttatttaattgtacacatggttacacatctctaccagtcatcgtcatcgtcctcttcgtcatcactctctctgcgggcgtgttgtctgatggctgccgccaaatcactggccatagtggtttcctcctgtttcttctctaacagtgctgctgcaagtccattggcaatattattattattagtattattaacagcaggggtacttgatgcaacacttgcagaaggaacactaacattatcaacagcaacaatataagcagttggaacccatccctctttactctcatctaatgtctttgctaatgaccatccacttggttcactttgtaaaatgtaaataatatctcccttagttaatggcattgatccattcgttcccgcataatcatattcagctctatatgttggatattttggtttatttgcaggtggaggtggtggaggtggtggagtaggagttggagttggtgtttgaacttgttgtaacttgttgaacttgttgaactttttgtacatgaactggtgttggaacaggatgtctatttctactaattggtgcaacaggttttggttttgctgctactgatgataatttaggtttattagatgcaggtggtggtgcaggtattgattgcttaactgtatttcttgattgattcattacaggtgatgatttaacataacctccaccacctctattttgaatacttctcttatatgcagcaattttttcacctgtaaatgcagttttactttgtggaacagctttatttcttgatgttggatcattaccttgtccaactgaaactgtacttgatttatatgtatcaccattcttattaatatctggtgttattttaaatttaactgtatgtttcttaccaggttttttacaataaacaatacttgaatcaatattaactttaactatttgaattaatttttttaaatcttgttaaaatttcagttttaaaaatacaattaataaataaatcaggcttctgttttagaatttaaattaattgcaatccaatcatctgctaaattactaactgaaacttgtggaattgataaaattgatttattaaattcaattgtatattttgccttattattaacaacactttgtccaataactaaaaatttattatccttggtaattaagaaaatttttgggaatttttgtgatgatctaccaaatttactatgtaattgttcaccctttccagaaaattgaactttttcctttaatccaattgaattcattaaaaatttaccaaaacctccagttctatcattacaacctaaataatcaccataaaatgatcttgaacctaataaacttaatcttcttctttgctttttaccataaactattttattaccaaaatctcttaattcaatatattgattactttcactaatacctttagttctaattttccataatctttgaataattctagctgcatcctctcttcttttaagccattttctacatgctctttgaataacttttgccttatttgcccaataattttctcttaaatcttctaatgcaaataaagtttcaggttttttaatgaaaactttactaacacctaattgccattcatttgaatcaaatttactatcatttaaaataatttcaacagcagttttagcatccccattccaaatatattcaccagcatatgatgtctttgttgataaaagataaaatctttcaacaaatttttcaaatgtttgtctataagcaaaacctgctcttctaattctaacattttcctttaaacctaaatatttaacttgatgtaaaactgccttagtatcatattcagttggtgatctattttgatttggtttaatagttctaatatatgaaggggttgcctgtgataatgtatcaactaataaattagcacttgttttaattttatcaccagcacttggaggtctccttttatttgattcatcaattttttcaggaaataatgaagttaaaaatgtatcttgagatgattgtaataattctaataaatcttttaacatttgatctttatttttatcagtcattgaattaatatcataagtaacatcacctgcataatgtttaacaataaatttattacctctaagatcaaaatgtttatttgaatttaacatatttaatctttgagcaaatgattgatctgcagctgaagaatctgcatgagcagttgcacatgcatcatttaatgcagcgaaaattccaggaggtctctttgattcaattaaatcacaaacaatttgattattgaaaaaatcaattggagtccatttaatttgttctttaatatattcatcttgttcagattttaaagttaattgaatgaaaatttgttgtaatttttcattaacataattaatacataattgttcaaaagaattatgttcaaaaatttcaaatccataaatatctaaaataccaattgattttaaaccatcattaccaatattagcaaaagattgattaactctatcaacaatccaatcaaataaattattataaatacccattgctaaagcatctttaactgcagttgcttgagttatatttaatggaacatgataaattgaacctcttttcataccatgagaagtttccattgttctttcagttaatgaagtagttaaaatttcaggattaacttgtaaaaggataagcaataaaattaataactgacatatcagcaatttcagaattaccatcttcatcttctttaaatgtaacattaccaatccataaaattgcagataataatttgaaaacattatccttttcatcctttgataaaccaattgtatccattgcttttaaagtttcattaaaatcaaataaatcatcaattgaatcaacagatgtacaaccagatgatgcagtataaatatattgttcaggtttttgaacaccgaaaatttgtctataattttcatcagctgctttagttaattgataaaaaatatggaaatttctttcatttttaatttgaccaacaactctttgcttttctaataaataattagtaatattagcagatactggttcaaaacttttattaaatttaatttctaaatatttaccatgtcttgaagaattattatttcttaaagttttagcacaaccaaaagattctaataaaggattagttgctaaaaccatatctttaattttttgaattgatgaagaattagttaaagaacctgaaacttcatgcaatatattgcataattctctttgcagcttcagttttacctgcacctgattcacctgaaataataacacattgattatcattataagcaatcatattatgatacatattttcagcaattgcataaacatgaggaggtacctctaatctatttttatttttataagacattaaaacatctaaagtataaatacctaaatctttgaaagggttaacagaaattaaaacatgaccaatataagtataaataattgcattttcaaatcttttctgtaaattattattaattgattcatcagaaattgttgaaagtaaagttaaatcagaaacaccgacttctttcttctttgtatgttcataagttgcctttttaattgcatttgaatttgaattagaggagggaaaagaagatgaatttgatttctttaccggtacagccgttttctgacgtgatcttttattgaatcccatcattttgatatgaaatggagagcaattgccttagagagtagaagaaatggtaaagaaaagacggtaataaaaggaaggcaaaacagagcctccatagtataattaattaattaataattgaaaaggggcaactgcaatgaggtcgatgcgtctacctattattttattttgttaagccttcttttattattatcatgaattgatttgattatgatcatcaataaagttaacaacatatattatacttatattctttctttcatttcacaaacacaatgtttgaattagatttcgataaatatttttcagtacaaatatttttcatcattccttagagagactattgaaagtgccattattgtttcagttttattatcttttattaatcaaaattcttatgatagagttaccggtcaattacttattgataaaacaatttataaaaaaatgaaaatgcaagtttggtttggtgcatttacaggttttggtatttgtttattaattggtggtattttcgttacattattttatataattggtacagatctttggagttatactgaacgtatttgggaaggtattttttcaattttaagtagtttaattattgcaattatgggattttcattattaagaattaatgcaatgaaaaataaatggactgctaatttattagaaagttttaaatctcatagtaatagtcattcctcaacaaatactgaatcagatcaattaattgaatcattagagaaacaaagtttaaaggaaaaatattttttagcatttttaccatttataacaactttaagagaaggattagaggcagttgttttcattggtggtattggagttaatcaaccaattagttcattcccattagctataattatgggatcattaattggattttcaattggttatataatttataaaggtggtaataaaatgtcaattcaatatttcctaattatttcaacatgtttcctttatttagttgcagcaggtttaattagtagaggtatttggtttttagaattagaacaatttgttcaaagatgtggaggtcaagatacaagtgaaagtggttcaggtcctggtagttatgatattaataatacaatttggcatgttaattgttgtaatggattaaaggatggtggatggatgatttttaatgcccttttaggttggaataatactgcaacttatggatcaattatttcttatgtgatattttggattagtattatattaatacttaaatgtaaatcattaattgaaaatgatggatatattaaatatttaccaattaaatatcaattaaaatatgttaaaaagagggttaaaatagcaaagttattaattgatgaaatagaagaaaatagtatatagtcttatataaaaccctttataattaattataataatgcattgaaaatgacagaaccagtaagacaagtgatcaattcatcattataattataagctctagcagtgacaacatatttaccaggtggtacttcaccaggaatttccacctctttggttaattcataattacctttcttaattggacatttcatatcaatattaggtaattcctcacataaatcataagtttgagaaattaattttatataaccaaatgtaactacaacatcaacataagcaccatcaattatatcatctgatatataaccctttgctgtaattgttaaattggtacctctctctggtggattaggggaaaggtctaattgttgtaaatctaaaatttgattataagatacatcacattgttccaatggtgaatctccaggaactggtttattaccagggaatagtgcagatatagcagatacgtactgtacgagtggtattgagaccataataatacttgatactcctataacatgtgataaataatcaaacaaacagaaaaacatgtaaattattgcctctacaatacaaaacacaccacccggagcgctgggaaaacaatgacccggagaaaatgactttgctcatttttcccacttgctctataaaaggatggggttttccccttgttttctgattcaagtatactacactctctttacacaagagctactttaatagcaaataaccaatcaataaccaacctaataaacaatacaaataaaatgtcaactgtaactaaagtttacgcaagatcaatctatgattcaagaggtaatccaactgttgaagttgaattaacaactgataaaggtattttcagaacaattgtcccatctggtgcatcaactggtgttcatgaagctttagaattaagagatggtgataaatcaaaatggttaggtaaaggtgtccttaaggcagttgctaatgttaatgaaattattgcacctgctgtcttaaaggctaatattccagttactgaacaattaaaattcgatcaattcttaattgatttagatggtactccaaataagggtaaattaggtgcaaatgctatcttaggtgtttcaatggcagttactaaggcagctgcagcttatgaaaatttaccactttatgcttatattagtaaattatcaggttcaaaatctccttatgttttaccagttccatttatgaatgttcttaatggtggttctcatgctggtggttcattagcattccaagaatttatgattgctccaactggtgcttcatccttcagtgaagctttaagaatgggttctgaagtttatcatcatttaaaatctttagcaaaggctaaatatggtcaaagtgctggtaatgttggtgatgaaggtggtgttgcaccagatatttcaactgctcaagaagctttagatttaattgttgaagcaattgaaaaggcaggttatactggtttaattaaaattgcaatggattcagcttcaagtgaatttttcaaaaatggtaaatatgatttagattataaaaatccaaatactgatggttcaaaggcaattactggtcatcaattaggtgatttatatgctgaattagttaaagattatccaattgtttcattagaagatccatttgctgaagatgattgggaaacttggtcaggtaatttcaataaattaccagttcaaattgttgcagatgatttaactgttactaatccattaagaattaaaaaagcaattgaagaaaaggctgcatctggtttattattaaaaattaatcaaattggtactatctctgaatcaattcaagctgcaaaagattctttcaatgcaggttggggtgttatggtttctcatagatctggtgaaactgaagatacttttattgcagatttaactgttggtttaagaactggtgaattaaaatcaggtgcacctgcaagaagtgaaagaatggctaaatataatcaattattaagaattgaagaagaattaggtgattctgcaatttatgctggtaagaatttcagaactgcttctcaaatttaaattacttaaattacttacattacatacatagttctatataatatatactaaactctattaatgatctttctcttataccaatgaataaaatcaagtaaatttgatcttgtctttcttaaattttttgaattaattgaaatttctaaatttttgaaaaatttaacctttttcattatcacttataagttcaattggtaatgaatttaagaaaatattaattgaatttaaattatcatcaatttgttgataataattattaatttgaaaaatttcaacaattaattcaattgatgaataaattaaatcttcattaaattttaaaattgaataatttaaaaattttataattaattcattattattttccttcaataaattgaaaattttaaattttaaaatatttggaatttcaaaataaattgaaattggtggattttctaaactccaacttaataaatctgttaaataatttataattaaatttaataattcaaattcattaaatttatcaattaattcaattgaaattttataaataatttcaacaattttaaaactatttaaaaattcaattggtttaaacattaaaatatcatttaacattcgataaaaatcttctaatatatcaacatttaattcattaaaattattttcataaatattaattaatatttcaatttgatttaatgaaaatgtccaaatattatttaatatatcaggtgttaatttaataaattcatcatcatcaatattatcattaccatcatcactaaattcttttattaaagtacctgaacaccataaataacaaccaaatttaaaatttttaaaaccttcaattaataaattttcaatatctgttaatgatggtaaaataaatcttttaaaattttgtatacatttcctaataaatttaattaatttttcactaattttagataatttaccaaatttattgaaaatattgaaaataattgggaaaatttcatttataataaatgttgaaataatataatttgaatcctttaatttaagaaattcatgtggtggttttaaattatcaatataaattgataaaatatctaatgaattacttatattgattatattattatcattattatcttccaaaagtgaattatttaacttcaatatagtatttttccaaaacatttgaattatattaatacattgatcaccattattaattaaattttctttaataaaatgatttaaaacatatgataaaccttcagttatatcttctaatgatttaatatctaaatgattttcaatatttgaatataaattatataatggttcaagataattaattaataaattattacaatccatacaaaaatattttaatgcatgacttgttgcaataattatttgtaatttttcatcttcattataattataaatttcattatttaatttaaaaccttcaataatataatttaattcaatttgtaaaaattcaggatgttgacttgtccaaattgtatatctacctaaaactaatgttgcagcatatctaattttaggattttcaggtaattgaataagataattcattatttgtggtaaaatttcattttcatttttattaatttctttagccattgatctaattgcaaataataaacattcaatttcttgccatttaatggtttcattattagtattttcaattaatgatttcaatttaagaaatggtatattaagtgaatcatattgtccaataactaaacaacaatcttttaaaacatcaccaatttcatatctaaaatctttaaatttatcttcttcctctttattattattaaataaaatacttatattagttgaatttgaaataattggatattttaaatgattaattaaaatttccattaattgttggaaaattggtttaaaaattttctttgattcatgaaatttatttaaaattaacattgattttaattcataccaaaatttaaaagtatatttaacaatatctaaatcatcattataattagttaattttaagataatttcaattaaatcttggaaagaatttggatctttaacaattaatgtatgccacatttcaccagtaattgaaaataattcagtaaatctttcaattatcattggatcatcccaattttcaataattaaaggtttaaataaaattaattgttgataaattatattaataaattgtaaattattttgtaaattatcaaatatatcaatttgattaattatagttataagacaatcaattgaagtatcaaaagtttcatcattattaaaaccatttataattaataaccaaattgaattattttcattattaagtaataaattaattggaatttcattaatccaagatttaatacaatgtaaaataagaattttaatattatcatccttgatatcatttgatgatgcatattgtgataaaatataataaatattttgagaatttgaagttaatttattaaattgaatatcatattcatcagaattaagtggtaatttagttggatcatttaattcctctggtaaaattttcaaaaattccaataaattgagtaaattatttgataatttatttaaaatttcattaattggatcaatccaattaagatcttgaattgttaaataagataaagcgattgataattgaataattaataatttatcattattataattatttaaagaattaagataatttaagattaaatttcttaataaaggtattgaagaatcaggtaattgaccaaaatcatattgagtctttgatttaagtgtttgacaaataaataattttaattcctgtgaatattgttcattctgttcattatttggtgttaaaattgagaaaataacatcccaagaatttaatgatttttgaaattccaaaaggaaattatttgcatcatttttaagttgaggagtggtattaccatataatgttgataatgctttatctaattctacagttatttccattagtttaaggttattctaaaagaagagttgtaggtgtaattgatgataaatttttacaccctcaatggcgacatgaaaatttccaattctgtatgtcttattttctttttatattatatacgaccatagcaatggctaaaagagtaagtaatacaccaccaattaatcaaatatttcaatatttacaaaatcaaaataatgtaatatatggttatatcaacaaaataaatttaaaattacaggtataattaaaggatttgatgaatttatgaatttaacaattgaaaatgccaaggaagttagtttaaaggatccattaaaggagagagtattaggtatgattatgattaaaggagataatatatcacttatatcatgtgtgtcgtagggagaggggagtattaggaaatgtgacgagtcataaaatgcattaaatggctggttgatattatattatggtatatatatagtgagtaatagtgtatttttttaaggatatatgttataactctttttagatgattgtataagtaatgagaataaattgtataatatatatgataattggagttgaatgtattaaaagtattgatgatagtaataataagataatggaattagttaaggaagaagatagggttaataaggtaatagataatataattaataatgattgtatgattaaagtaatgaataaatattattatagatatgaaattgaagagagagaaaaaggagatattgaagaaataattaatttacaaggtagagatgtattaattaagataatttcaattgaattaactaaatgtttatttgagaataataagagagtaagattaagtgaagtatgttatgaaaatacgggatgggaagtaataaagatagaaaaatgtattgaagatattagtttaaataataatatgtggacaacatttaatggatatttagttaatattgataatttaatgaataataggataaataagattgaaaatttacaaataattgaagaatataagaatatgatacaatatatgaataaatatttacaggatatgatacgaatggatagtgatagggaaggtagagaggaagaaatggttaatcaagttagggaagttaaagaggttttggatgaaatgaataataggataattgaggttaatgaaatgaatatccgattacgtaatgagatcgtgttacgtaataataattatggcttacgtaagtgtgcggttattattttatttattacttgcggcttaatatccttgcagtgtggcaatttaattttaattaattttctttccatcctatgcggctttctattgtgtggttatataattaaacagttttctcaatgagatggatggaagagatgcttctctaatggacatctctcttcttttatcagcttcataagtatgagttactatactcctactaaccctacaaataatcagtatataccatatccctatccatcacctattccaactcctataaactataataataatattaataataatattattaataataatatcattccaaataataatactggttattattacaactatacctataataatgttcaattaaatactaatactaataccaatactaatactaataataattacaatcaatatccaatatactatactaatcctatacaattaccaatacatccattaattcaaccaaaatttataccaaaaagaataattactccaccaattgctaccactacaacgaaaaacactatacaagagaaagagaaggaaatataatgaaattaaaagactttataaatgtaattatcaaaattgtaataaaagttatggtacattaaaccatctaaatttccatattcaattacaaaatcatggaataaagagaaatccaatagaatttaaacatttaaagaaagataaatgaacaaaaataaaaacgttatcaacgtttattatattattattatgcatgtaacatcgggatttagctattagcacctcggttattgccgattagatcttagaaactattttccaattaccggtatgcggctttatttttattttactaatggcttaatttctttatagtttaatttactttttatttaatcacgtgtatgcggcttataattaataattataatatcactatacaataattattctagaatcacaatacccatttcttttaaccaaatgttcaaaaagagaagttttaaatcatcaaataggaatactaacttagatattatagataatgataatgataatatagaagacacagatatagcatataaacctaaaagacaatcaacaatttcatttaagaaaaaactcaaatcatcaccaccaccaccatctacacaacctacacacgacacaccttacataaatcaattcgatgatatagaattagaaactcccataaccaaccaccccattataccaaatacattatcagttcatagattaactcctccctttcttaataaagataaaattttatcttcaaataatttatcaattaactataattattaaggataaatctggtgatttatttaaattttcccatttaggttcaaatttattaaaagattatcgtaatttattagaatattaaattatctaatgatttattacctaatgataagtcctcatctaatgataattattcaataaaacaatcccctaaaggagcctatcaataataataaaaatctacccagcttataaagttaaagatcaattacttaaaataattgatgaaaatcaagtaattatcatcattggtgaaacaggttctggtaaaacaactcaattacctcaaatcctctataattcaggttattccaaaaatggtaaaattggtataactcaacctcgtagaatggctgcaatttcaattgcaaatagagtttcaaatgaaatgggcgttaaattaggtaatgaagttggttattcaattagatttaatgatttaacttcacaactaacgaaaataaaatttatgactgatggaatcttattaagagaaactttattggataatttattatctaattattcttgtattatcattgatgaagctcatgaaagatctttaaatactgatatacttttggggattttcaaaaatttattatcaaagagaagagattttaaattaattataacttctgcaacaatgaattcttcaaaattttctaaatttttcaataatgcaattcaatttaaaatacctggtaaaacttacccagttgaaataatgtatcaatctgtaccaacctgttgattatatagattcagctataaagcaagctttaaaaattcatatttcaactcctcatactcctaatgataattctgatatcttaatatttatgacaggtcaagaagatattgatatttcatgtcaattattatcaattgaattaaaaaaattacaaaaaattaatgataaaataattgatttacaaatattaccagtttattcaacaatgtctaattcattacaatcgaaaatttttcaaaattcccccattaaggaaatgtataattgcaacaaatattgctgaaacttcacttactcttaatcatattaaatttgtaattgattcaggtttaatgaaattaaaaatttataatccaaaattaaatattgattcattacaattagtaccaatttcaaaagctcaagcaattcaaagatctggtagagcaggtagaatttgtccaggaattgcatttagattatatactttatcatcttatgaaaatgaaatgtttgataatccaatacctgaaattcaaagaagtaatttaatgaatactatattattattgaaaaatttaaatataaataaaatctctaatttcccattcattgatccaccttcaattgaattaattgaaacttctcaatatgaattatggtcaattggtgcattaaataattatggtgaattaactaatttaggtaaagaaatgtgtaaatatccaattgatccaaatttatcaaaattattaattatttccaatcaagaaaatttccaatgttgtgaagaaattttgaaaattatttcaatgttatcagttccatcagttttcataatttctaaaaaaaatattaaattacaagaaaaaattactaaaattagggaaaatttccaaattttcgatagtgatcatttaactttattaaatattttcaatcaatttcaaaatgtaaaagaacatgaaagagaaaaatggtgtttgaaaaattattttaattataaatcattaagaaatgcaattgaaattaattctcaattaagacaattagttattaaaaataataaaaatattactacatgttataataattgggaaattataaaagaatgtatttgtgcaagtttctttgcaaatgcagctgaatttttcaaacataatcaatataaacatattagaacaggtttagaaatgtttataccaataacttcatcatttaatggattaaatgatttaccaaaatttataattttcaatgatattatattaacaggtacaaagcaacaaatgaattatataactgctgttaaatatgattggttaattaaatatgggaaaattttttattcacctaaattaaaaggtattaattcaagagaaaatcaaaaattaaaggaagaagaatttaataaaaatttataaaaatttataaaatttataaagtttataaaggtttaaaaatcatattatctattaatctagttgtttcattatttatttcattattggaatttggtacataaacagccattgataaaatacatccaatttttggatcaatatttgttaaataacttaaatctcttggatcattgaatgatatataatcaattttaaatttatcattaatattagtaatataatttgatacaagttcagttaatttttcaacattaaattcaccatttaaatattcttcatttgataatttcatacttttatataaacatgtaacttcatttaatatatcattggataaatatttatttcttgaacttaatgctaaaccattttcatttcgaattgttggtacaattttaatatttatatttaaaaataaatctttaactaaatttttaattacaattgtttgttgaatatccttttgtccaaaatatgcatttgttggcataactatattaaataatttagttacaacagttgcaacacctttgaaaaaagttggtcttttcaaaccttctaatggtttactaacacctaaaacttcaacaaatgaacctttttgattattaatatcaaatgtaaatcctgatggatacatttcctctacacttggtttgaaaattgcatcaactttaccaattgctaattcttttaataatttcaatatcatgattaatatctcttggataagtatctaaatcttcatttggtgaaaattgtgatggattaacgaaaattgaaataattgtatgtttattatctttaattgattcattcactaatgataaatgtccttcatgtaaatatcccatagttggaacaaatccaagcgattcatggttgaaagatcccactaatgaacgtagttccttgactgtggtaatgataggtatctcagacatctccatctcttactcccagagaaaagaacccagagtcaattcatgtaagaaagtggaaaatctgaaaaatttcaacgacttgaaaaaacggtcgctttttccaaattttgacgtttttcttatcttatcagtagagtttactggttgcttttatgtttatctactttctttctttcttttcttttcttttctttgggcaaatgggacagaacgtatccactgacaattgcaataagcatacaattactatccctaatcagggtacattaactggttacactttgaaaaacccttccaatggtaaaccaacatgtcatagattcaccaatattccatatgcattaccaacaaaacaaagattctcattaccttcatcaattcctgatgattatgattatagtaatggtaattatttagaatttggattaaaatgtcctcaacctgtttatcaaagtaaacaaattcaatatactttaagtgatagtactgaacatattcaatatgttaatatttggattccatcatcagataaatttaaaccaaaaaatggttggcctgtattaatttatattcatggaggttggttacaatatggtgatccaaataatgagtttttcaatactgttgaattaatggatgatgagaattttaaagacaaatatattttcgttactccaggttatagattaaatattttcggatttttaacttgtgatgaattaattaaggaaaatcctaaaaatactaatatgggtttttgggatcaacgtgaatctattaaatgggtttataaatatattaaatattttggtggtgatccagaaaagattacattatctggattaagtgcaggttcatattccgctttctttcaattagcttatgaattatataatcctaatgaagaacaaattattaaacaagttattttcttttcaaatatgatttatagtcaaccaaagagtattgatgaatgtaaagaacaatatgatgaagttgttaaaaaattaaatattgaaaatttatcacaatctgaacaattaaaatatttaagatctttagattataaatttttagaagaatttttaccaaaattagaattacatacttttagagcagttactgatgatcatttcatttcatcaaatattttaaaagatattgtttcaggtgaattttctcgtttattaaatgcaaaaggtattagaattatgcatggtgaagttgataatgaatcatacctttattcattattaaatcctccaacatcatttgatgatttacaacttcaagttgagaattattatccaagaaaagtttcatcattgttaatggatatttataatgttaaaaaggaaattgatattaattccaataataaggatgaaaaatttgctcaattatttggtaaaattgttggtgatggacaagtttatgtttcaactagaggttttattaataatattattaagaatggatttaataaaaatgattattatcgttatagaattagttttagaggtaaatggttagatgaacatttagatccaaaagttaaagttactcatgcatatgataaaccaatttggttttatacattaagagttggatttaataatgaagagaaaaagcaaattgatttatttttaaaaccttatttagaatttattaattttgaaaaagatattaaagattgggaaacttatgatgaaactaaaattagatggtttaaagatgatggtagtattacttatgagaaagatcctgattgggatagaagtattattattgcggaaaaagtttataatattcaattataaaatagattgtatagaatagtattaaaataagtttactttattattattattatattttttgaggtttatcagttggatgaattggaggttcaacaattgttgcatttgcagcttttttattatccattaatctaagtaaatttcttaaaagcattgcaattgtaactttaccaattgaaggtacataaagtgaagcaactttttcaacatcttcatcaataaaattattttcacttgaaaaattaattacaattgcaccacgtttaatatattcacttgggaatttataagtatttgttggaacaccagttataattatatctgaaattttagcacattcctctaatgatttattacaatttaaaactttatgttgtttatatcttaaaccatcacctctttcatataattgaatatcatttatatcaacagaataaacagttgcaccatcatttgctaataatgaagctaaaggtctaccaacaatttcacttctattaacaattgtaacagttttaccatataatctatcaccaggattaagcattttattataagcaccaatatattctaaaattttaacaactgctaatggagtacaaggtaaaattgatttcattgttttattttcatctaaatatctaatattatgatacatatttgaaatatatttaaaatttaaaccttcaacatctttatgtaatgaaacacattgttgtaaatattgatcttgcttgttaccgaaaactgggaaataaacaatcataccattaatattatcattattattacatttataaatttcttcctctaattgatcttttgaaacttgaattaattcatattggaaacctaaattacttgcagttttaccagtccaagttgcatacatcattgcagctggatcatcatttgctaaaagcccaactaattttggtttaattgctaattttgaagttttatcagtaacttcttgaatataagcttttgcaattttagatgcaggtatgactttacaagctttagctaatgcggacatggtggtatataagagattgtccaaagaagaagaagtaatataaaacatgaaaacaagtgaaaaatcgaataaatagatataataaagaataaaatttttttgacacaataagtactaataataagataagaagggtcagagtcaaaattatgttacctaatctttttcaattggtagcaagtgctttatcttcttcttcttcttcttctttctactgctgctctataatgatgattcacttttaaagatagtgtgttaattgttgcatgtcttgtatctcttagaaagtgctatttgtaatcaaatagcaaggaaaacaaaatttttttgaaataactagataatttactatagtttccagctatgtttcattgtttgctattaaaacgacttaaagtaaactctcaataacattactatccatcaattaacggtgtttatttcatagagtatcatgcatttctgtagatgtcttacattgaagataaacttacgtaatagaagtatacattgattaatactgattataagtaggaacaccctacgagtattaatgggttacctacctactgcttctaaataaagaccagatagaccttaataaatcaaatatatcatcaggataagtagatgatcaatcattaaagaaacagtgtaatttgctacctaatagcactgtaaattgaataagatacccaaataggcaattcagaccagacgatttggacatgcagtgatatttcacattataatagtgttgattggatagtttatacagtctttattggagggttcttccttttcagtaatacaatctgttatggatactagtaatatcaatcacgattttgccaaattggcaactactgcatcggtattggttaattctgctacatctaatgcaaatattaatgaaatgttacaaaaaaataatgttttccaatcaacttttgattcacagggtaataacaataaacacggagatggtaatggtaaaggacttataggattattagctaaacatgaagataatttacgtattggtagagtattaaaagagagtaattttacaagtgatggcaaaaagaagaaagattttaatattttaacaaatgaaatgcttaatgatatacctgaatcagatcaagatatttcacgtagtaatagtagtggacaagatcaagatgcttttagtaggaatgagtaatgatgataaaccattttctttatttcaaggatttagtgcaattctaccacaagttgatgaaactataaataatattaaacaaatgtcaggaaaattaatagaagattcaaacaataataataaaaataataataaaagtacaaatagaatcaatggttatagtaaaaatgtaaggaacttctaataaaatagatgaaatatcaagtgaaaagattaaatcatgtcaaagtaagaaaatattaaataattttacattcaaatattaattattatttagatttaatggaaattcgtaaaggattagggtaaaagtgaaattaatgaaatagattctaaaattgatagattattcttacgtagaaaggaaattacctgatgatattaaatattatgaagaaagagaaattttattagagaatcatcttttagagattaaagaacgtttagagtttattaaagatatagttgaaccagagagtgaagaaagtaatgaaaatattaatgatattaatagtgggaaaaaaatagtaaataaaaatgaaaagataaaagcaaataattctatagataaaacaaataatgataatgaaaagaataatgaaaagaacaataaagcagatgaagagaatattagtgatgattccagtgatgattatgttactgttaatatggaagataattcatcaacatcaggatattcaagaattaaacatacaaataaaaatacgaaacccggtgatcaaatacatcaatttcaagcacataatgaatcaattaattgtattgcatttgatcaaccatataataagatgattacatgttctattgataatactgttagattatggaatttaaataaatataaatgtattggattattagagggacattatgcatcagttgaatgtgttacaattgataataatttagcatttactggtagtcatgatgcaactattaaactttgggatttagattattttgataataaaaataatagtaccagtaatgataattatgaaaatgaaaataaacctttattaaagagttttgaaggtcatatggatacagttacggctataagttatagtaatggagaattagtttcaggatctgaggataaaactataagacaatgggatttgaatactggacatttaattcaaacaatggatataatgtgggcatcatcaatggctaattcaatgataaattttggaaatgattctactactactgctaatataaatcgtaatgataataaatttagaaataatatacaaaataataacaaagtatatccatatatttcatcattacaagtatttgatgcagcattagcaacgggtacaaatgatggtattgttagattatgggatttaagaagtggtgaagtaattagacaattatttggacatacaggacctgttacaacaattcaatttgataaaaattttaatttaattacaggatctgcagatagaagtgtacgtatttgggatttaagaagtggtggattaatggattcttatagttatgaaaatcctattaagaaattagtatttgatgattttaaaattgcaagtgtagttgaaaatgaatctggtgttcgtatatatgatagaaccgaacaacgtcattggcaaataggcagtggtgaaagtggtgataccaatgacgacacttacactacagacatgacattccagggtaattaccttacggagagtagtaataaaggtgttgtcactgtgtggaatgtgtagtattgtatattgttatgtaaatagaggaaattccgaaaattgcgagttttgtcgacatgaaaaattatttcactgtgaagaaggtcagtcttagagtacacttcttctttggataacaagcatgtcatatagacaaacccctactatagttgtccttcaagaaggtactgatacctctcaaggtagaggacaaatcatttctaatattaatgcatgtttagcaattcaagatacattaaaatcaacacttggaccatttggtagtgatcttttaatggttggatcagatggtaaaacaacaattactaatgatggtgcaacaattttaaagaaattagatgttgttcatccagctgctaaaattttagttgatattagtagatcacaagattgtgaaattggtgatggtacaacaagtgtttgtcttttagcaagtgaaattttgaaaaattgtaaacctttcattgaagaaggtatgagtagtcattcaattattaaaggtttaagagaatcatgtaattttgttattgaaaaaattaaagatttagaaattaatcttgatgaaaaacctttagatgaagaatatgatatgttaattaaatgtgcattaactgcaatgaatagtaaaattattcaacaaaatggtaaattttattcaaaattagttgttgattctgttttaacattagatagagatgatttagatgaaaatttaattggtataaagaaaattccaggtggtgcaatggaagattcattatttattaaaggtgttggatttaagaaaactttttcatatgcaggatttgaacaacaaccaaaaaaatttattaatcctaaaattttatcattaaatgttgaattagaattaaaggcagaaaaggataatgcagaagttagaattgaaaaagttgaagattatcaaaaaattgttgatgcagaatgggggattataatggataaattaaataaaattattgaaactggatgtaatatagttttaagtaaattaccaattggtgatttagcaacacaatttttcgctgataggggtatattttgtgcaggtagagtttcaaatgatgatttagaacgtacaaataaagcagttggtggatcaattttaacaagtgttaatgatattaataaagaaattgaattaggtacatgtgaaaaatttgaagaattacaaattggtagtgaaagatttaatattttcagtggatgtccattaacaaagacatgtacattaattttaagaggaggatcaattaaaattattgatgaaattgaacgttcattacatgatgcaattatgattgttaaaagagcattaaagaataaacaaattgtttcaggtggtggagcaattgaaatggaattaagtaaaaatttaagagattattcacattcaattaagggtaaaagacaattaataattcaaagttttgcaaaatcattagaaattattccaagacaattatgtgaaaatgcaggtttagatagtattgaattattaaataaactacgtaatttacatgcaaataatgaaattaattttggattagatttagataatgataatgtttcaaataattttgaaaaatttatttgggaaccatcagttgttaaaattaatgcattacaaagtgcaacagaggcggcaattttagttttaagtgttgatgaaactatacaaaataaggaaaatgatgcacaaggtggtgcaccaagaggtagaggtatgccaatgccagcaggtatgtaagtatcctaattaattaatagcttttttaaaattttctatagttttattaactaataaatcatcctttaaatcattcttaattaattttttaatttccaaccaagtattatcagaaatgacaccttgttctatttctttttgactatcaatatccattggttcaggagattctataaattctttaaatttagaaatcagtacattaaatgacactttcttagcatcatcaccaattgatgaaataactaattctggatcatttaatgtttttgcacgtaacattaatttaatatcagctggatcaataattaattttaattcatgcttaagtaaatttgcaagttgaattttaatttggaaaatacttgtattattagaaactggtaattgtttaattatattaaactttggttgtctaagtgatttaaatgtaaattctatatcgtgagttgattcagtggtagtatcattattattatcattattatcactatcatcctttattataaatggattgacgatattggggaaattaaaagattttggtaatttattaacattattaatattaaattccacaatttcactgttaccattacctgtaacgttcaataaatgcaggaaagtctttgcaaactctacttcagttgtcattacagtgtcttacacaaagaaaagagagtacttactatataaatcctacttaccacttacttactcgaaaaactacttttttgtgtaaattttcttaattcttctattaagacctgcattccagtaagctgtcttcagtttacgtatattaacatcatctgaccagttggttataccgtttaactctggtaataatctctcgttatcattgaaccatttattgtattcattctgtgtaattaaatttctaaatatttcaacaataaataaattaacattaattattcttttgggggtattctgtataatttgaaataattcagtcattaatttacatttctttaattctggttcaagcatggaaaatatacctaatgatatttgtaatataattttagggtgttcataaaatattatatcccaaatacgtaatgttgattcaattggtaatacaccaataaataatgacataaaccaattagttgtacaaaatgttaatgttggtatatttgaattatctgattcattattattcattataattttccaaacatcaggtaatctatcatgtaaacattttaatagggaatattgatatgttgttaaacctgataaatcagttgaatgtacattaggtaaatatttatctgttattatagttaacatccaaaatgcctcttcctctgacataaatattaataacataccacaaatgaaattcaatgattgacaataaccaattttggtattataaatactaaaagcttttaaaactcttgataatgcgtcaagcattggattagtactattattatcattattactatcagtaaaataaatattatccgggaaagttctattcaaatctttttctatagcatcaatatatttacattgatttaattttaatattaaattttcataaactcctttattattattcattaattcatcaccattaacaaaatgaaaccaagctttacctctccattcaggtggtatacctttccttataaattttttcaattcatcaaatttaagtgggaatgaattaggtaaatgagttttatcatcaataaagcaaccacatttatttaaaaatttaatccatttacgtttacgtcgttttaaatatggataataatcattccaccaagattgataatcttgaattgaaatatattgtgatgatatattaaaaccataaatatcatgtgtaagtggtccttccctattattgccgttgtgtttcatattatgtgagatcttcctctttaaatcattaaactgtatccttgaattaaatatattatcattattatcattattatcattattatcattattattaatagcagacaatgattctccctcactctcagcatagatatccaacagagtgcaagcacccgtagtggcagtagacgggtacctctgatgtgtcatagtatctataactgtgtatccaccacttccagaacagaaaacaaagaaaagaaaagagtaataagagtatttaaagagtaataagagtataataaggaaatgcctattaagccgcgtcgtaataattggcaacatgaatttggacatttacccttaactgcttcttctgcttcttttgaaactatggtcactgtggaggactctaatatctatctgaaaggtctaagtgctcaccaatgggtcgtggtgagagttattgcaatagtgatctcgtcaatttcaattatatcaggatttgtgttcatttatttctttttaatgattcatccgtcaagaagaaatttcagacacacattaattatgtttttgatattctttgacttcattaaatctgttgcaatattagtattttcttcaatgacattggccaaggtaaacgatttagatgaatcacttatatctggtattggttggttggcagttttctcaatagaaggtgcagatgtaattattttctcatttgctattcatatggcattacttatatttaatactcaaaatttacaagttaaaaattatctgagtagtaaatttttctcctttggaaatcacaataactctgataataaatcagaaggtggattatatgattacagatatataatctacattatttcattcttattcccaattttacttgcttcaattagttattatatggatactccatatcaagaatttgtttatatggcattttttagaatttatactggctcttggtggttctcttggtcaatcagacatgttatcgctgttggaattatcgtcatttatatcacaatttatgtctatgttatgatgcaatttaaaaaagtttcgaaatcttttagaaagaggaaaaatacagttgttggtggagtgccagaaagtgatgacgataatgatgatgaaagtttctcagatgatgaagataatgaagatgatggattactgaaaaatacttttggtggttcattatggtatactatttttaaatttttatcaatgttagttttcccagatgttagaatttcagcaaaattacatggtcattcattgaaaactgataaagatttgaaaaatattgaaaaattgaaaaatgaatcatcaattcaaacagattcaatatttcagatagtttccgtagaattagtgatttaacaatttcaaatgattcaaattcaaattataagtttaataatttttcttcaattaattatgcaaataattcaaaaggaagaaatttctaaacaaattcaaaatttactgtatgatgaagcaatggataaatttaattcacgtaaattacaaattatgaaacaaatgaaaattattttcatttatccaatttcttttattttgttatggttatttccttttattaatcattatcaagttattagattcaaatatgaaacaatgtggtcaactgctccttcagcagttttccaaccaatgagttgttttgttgatacaattgttttcttaataagggaaaaaccttggcaattaactgaaaatattaatcaaatttcaaaaaaaaataatttagataatgatgaaaaaaattggagatattatatttcttggttaccaggttatggtaattatggtaatatttcaaaatttaataattcacaaaattcatcatttaattcatcaaaattagaaaatcaagattattttaataataataataataataataataataatgatgatgatttcatttcaacaaatgattttaatgaatctgatgaaatgagtatgactgattttcttaatatgaaatcaatacccaacaccaaaaatattcaaagaaaggataaaaaatataatcaattcaaaaataatacacaattacatccaataaattcaatgaatgaatctttaattaatatacccacaaaagctaaacttaaaaatcaatttgattggaacactaatatgtttgaaaattctgaaatggatatacaagaatttctaaaatcaggtccaacaaaataatttacacaatttaatgctctttcttttacttgctttacttatcttcttttccacaaaaaaaaccgtccctttatttatttatttaaattatttatgtttacttattataaaaaatacattatttctccgctgtaactaacatcaatgtatcaagaccaacaattaaaccatcactaaatgatgaattccatgaattataaaaattttcaatttcttctaaactaccattattaatccaaacatcaccactattattattaaataatctaacacctaattcattatcataaccttcattatcaacattttcacttaaccttttaattataattttatgtaatttttcactattaacattatttaatttccaatcaatccaaattttcaaaatttcaattatttcattagttggtaatttatattcttgtggattattaatccatgaatttaatttacttacatgagaaattcttaaaaaatctaaaaatgatgaaaacattgcatacattgatgcaattggttgatctgcaattgttggtattgatgaatttcttttagatgattcaatttctccttgattttcattagtttcatcaatttctgattcttgaatattctcttgttcatcaacttcttgttcaataggtttagatcctaatgaattagttggttgaatattaattggagttctagtactcgtatatgaatcacttaattttgttgatgacctttgtaattttaatgaaattgaattatttgaactatttctcttacttttaattaatgttgaattcgaatttgaatttgctgttgaatttgaattaatttgatttaattgttgaattattagaattttcttcattttgaatgttatttaaattattgtttgatttaattttaggtattggaattggaattgatgattcattagagttaatagctgatgaaaggattttcatgttccttttgttgatcaacaacattgtgaactttgttatccttattattattcaaactttcattataatcaagaacgggtataccaagtttagtaaatttaatatttttaaaatttttctccttcaaaatatttaaaactaattcagtaattattgtcatatttgaaatttttgaaattaaaaaattaatataaatttgaatatattcagataaaaaaacattatgttctaaatttgatgaatgtttataagttgaaatatcaaataaaattaatgaaattgaaccacctatttttaaaactctataaatttcatttaaactatttttaatatcattttcattttttattaatcttgtaaaatcaggtgtataaactaaacattgtgaattatccctaaatggtaatttatttattgaaggtacaataaatgatgaataattagttaaaaaatctttctctttactatctaatttattattaacaaaatcttctgataaaaatacataatcattaaaatgaggatattgttgtaaaatatcaattggtaaataacttgtattattcagatttaaaattgtttgaaatctatcagcaatattaatcatattagttttataatttgggaaatcatgtcttaattgccaaccatcaattagttctagttttgatgggaataaatgatttttaaaaattttcggtaaagattcatcaggtttattattaaaaggtttaattttatttgttgttataatacaaatttcttcattattatgagtattatgagtattaacttgcttttgaagtaaatttgttaaaacttgcttttgattggataaattgtataatatttgattttgccaaagtaaaagtagtaaaattctacgatcttggaaagtttctttatcaatttgatcaattgttggtatattttgtattttcaatttaatttcttctatttcattatttaaagttgttaattcatcaatattttccatatattcatgttcattacttttagaaatattcagactatgattatcatcatcaattgtaatattattctctatattattttcattttctaaatgattccttattttaattaaatatttaacaaaccattgattccaaaatgaatttctcgtatttgaataaatgaatggatcattcccttcagcttcatccatataagttaagaaaaatctaagataatccagataaaattccatactatgagttcttgttaatgtcattacatttctcagttttgtatgatattctaaatacaattgttgtttaagatgttgtctttgattgattaaactgggtgtatttgtattactattcgtaatattattattattattattattattactatttcttaaatgttgatattcataatgtttttgaggattaaattgtggaatatagggattatgattaactggatcctctgcaaatgcattaccaaatgcaatatcacttgcaaatttagatgcttttttggtaaatttaaataatttactccttgtattattattattattattattattattattattattattaatagttgaatttatagtggtattaattgttgaattattgtttgataaaatcgaatgagttggagatgttggatgattattataattattattataaattggcatatctggtgtagtagatgaacgttgaatcattgtactttgactataccttgaatcatccttcatcatattaattgaatgaatatttggagtattattatcattagataaattatcattagatacattaccacctttatgtttcctatggtgaaattttttaaatatatgtctcttattagttatcttagccactccaatatcagcttcctcatccaccgtatgatcattacgattaatcattgtgtgttgtatggtgaaagatctaggataaaagaagttacagtagttaaacaagaagaaatctggaaattaaacataacataaattacttaatcaatatatacattacaatctttaaacagtgataaatggtgaagagtccttctctgatatgataacggtaccatcaatcttactagataacaactctttcattactttaagatatcctctctcagtatttgaatgtccacagagaataactgatttattattcgttaaataagctaattgttcatgatgtgataattcacccgtgtagtaaagatcaatagattcattatcattaatattatcaaatactccactgccactacctgcacagagagctattttcttaacaagtgtatccttattaggtgtaattaattgaaggtattcaatacctaatgatttcttaatattattgacaatgtccattaatgataatggatttgctaaagtaacaattctacccatacctatattatcattagtagaatccttttcaataacctctgtagtgatatcatcattactgatccccttggctaaccaatcattaacaccacctattgcagcatcaactgctgtatgaggtgaataaacacttatattattttgaattaatttaattaatgatctatgttgactattattatctggtgtaatcttattaaatttacgaaataggaatggatgatatgcaactataatattaatattattagcaattgcttcatctgcaactgattcagttaaatcgattgttaacattatgtttgcagaggtggatgtactcttttcattactactatcaactaataacccggtattatcccaagtatgattagcatatttaagaggatacaatccctccaaggcagtgacaaccctctgcaatgacgccttacttaaaccagacatgttgtcttgatcttgtcctataaagaaacaacaaattgtgattactacactactaatttttttccacccattaactacaatctctttctttcaagacattaagacaaacacagacaaccaatgttaacatcagaatcattaacagcaataattaaggaacgtttacaggctacagaggtagaggtacaagatatgtcaggtggttgtggacaagcatttgcagttataattgtaagtgatatattccagggtaagaataaactatcccgtcatagattagttaatgcagctttacgtgatgaaattgctgaaattcatgcttttacacagaaagtatttacagttagtgaatgggatgaacaaaagagaatgtttagcagttaagtaagttatctatgtatactagtttataatgaataaggtggtggtgcagtaactacattactattattattattattaagtcgacgtttacgttgttcaactaatctatctaatttagcaacacgtcttcgtatttccttttcatcaggattagtagtatcattggtagaagtgcccgtagtcacctttaccgcttcattggtttgtaatgtacgtttaatagtagatggacgtcgtgatgatactgatgaaggtattgaactctgtcttctagatgaacgtcttgacgttgattcactattattcattggaatagatttaatattatcctttacttcttcctcctcttcatcaattattgcactttcattaatttccttcttcttaacattcatcttaataactcttctctttggtttatgatttgaagttttcaaaaatgctttattttggaaatttttaataaatcctaatttatcattaatatcaccataattaaaatcttcttcactcaaatcaattctattataattactaaaattatttgaattattaataattatatttaaatatgcctttgttataatatttttattaaatctatcacatgataatttatcaattccattacctaaacttaaagtttgtctaatacttgataatcttgtactcctcattaaactaccaggtgaaattctaaatggattttctggatctaattcttttaataatattttattcttccttttattaaaatcatcttcttgttcctcaattaataaatctttatgaaattgatcaaatgattgtgttgtatatttaagactaaatttataaagtaaacttggtaaaaattctttaaagatatcacttatttgactttcaatcttcttctgtaaaaaattagcaattggtgtaattttatcaaatgttgaattaacatcaatattttccaaggggtcattcttgaaaactaatgttaaccctttactcttactgaaaacaattataataattgaactcatttggaaattacttaatgttaaatttaatggtatatcaaaatcacaatcacttacaataaatttaggtttaataaattccaatttttcatcaatattattattataatttttcaataaacttgcactaatctttgtcttgaacagttataaatgcatcaccataatatttaaattggaaaatacctctaaatttatcaacacctaaatcaccaatttcaagtatttggaaatttggtgcaattgtaccaaaatttaattcaattattttaatttcatcacttaaaatacttggccttttaccactatttaatgcttcctctaataattccttagtatatgtagagaatgaatctttctctattgcattccaatttaacttaaatgacattgctaagaggaaagagaggatataggaggttatattattattgacattacgtaagttgtttgtatttgtataattatataactgctacactaaacaagtttatctaaatcaattctttcaatatcattaactaattgtaaaactgatatgtctttacaatctgtattctctgtaatttcattattttcaatacttgatattaatgaattaatattaaattcatttttaaattgattaattaatttttcattaattttataattcaattaatgaattattatctatttcatttatattttcaattatattattaatatcaatacttattgatattttttcaggtgatattggtataaaagtattattttgcatacctaatttaataattgcatggaactgaggtaattcaattccacgtcttgattttttaattttcattaattcataatttgtttcaaaaattgtatcaatttcattttcaattaattcatcttttgacattggataagcttttaaaaatgccattttaaattcatttttagttaagaaacctttattagatttatcaaatttattaaataataatttaattggatctgattcaatatgaaattcattcttaattaatgaatgaattatgctattattattgttactgtcattatatttaattatattgtataatttagaattattagttaattgttcattagttgatttaattgattcgattgatttaattaaaaatttatttaaaaatgataatttattacgttgtttaataagtattgatttataatcatatatggttctatcattattaattgaatttaaattattaattaaattattaatttgatatgatgtaaggtataaattatataaaccttttaaatcttcactaatattaaataattcaattttacgatttgaataattatcaaattttgtaaatgattcaattatatcattttcaattattttcaatgatttattaatattggtatttattttttcaaatttattatttaattcatttaatttatcattaatgaaagaaattatattattcttgagaattattaactgatttaatcaatatatcataaaggaaattaattttttcaattgattgttgttcaggttctttaaattttttcaattgataatttataaggaaatcatttaatgaagatttaagtaataataattctaattttgattcaaatattttattcattgttgaattattaaaagtatttataattgatatattatcaataaatatatcaatatcattattatcattattatcttcaattttaataaattcaattaattcattaaatgatttacaattatatttccttatttcataatcataattataatcataacactcaatttcactaaacttaccaattaattcaacaatttcaattattaaagtttcacaatttttaattaatttaaattttaaataattaatatgacttataattgataaaaataattcaatatttaattttttctttaatttatcttcattaccattatcttcttcaatactattatctaatggacctgccttatataacacattagggaccaaagaattcattaaattctgttaaattgttcattgctcatataaagaaagagcaatggataatacaaattataatactggagattgcgcttatacaaaaaatatacaaatactatactcttttctataattattcaaagaaaggatgattaattgcttccaatggcagttaatcttaattgatgatcataaattaataaattatcaattaaatcaactgccaatttattatttgaataatttttattatcttgattattaaaacttgaccaaggtcgacgtttataatcacctaaaattggatcaaattctgatggtaattttaaaccatattttgaaacataatttttcaattcttgtgtacctaaaacttgagcaattttaattaattgatcttgatttgaatcacctttgaaagaaaggttccttacgataaataattgcagctaacattgcaccaactgaccataaatctaatgaataatcatattgttgtaaattaattaataattcaggtcctttatgataccttgaagcaactctaacattaaaattagtaccaggatgataaaattctgctaacccccaatcaattaattttaattttttattaattggatcaatcattatattttgaggtttaacatctctatgaattatacccattgaatgagcataattaagagctaataataattgtttaaaataaaattttatatcattaattgaaaattttggatataaaattctaaaatctatattattaactttttcaaatataagtgcaggtatttgactatctttatcttgtaaaatatcataaaggttaacaatatttataccattatttaaattttgtaaaattttaatttctctgaaaattttctttaatttaacaggttttaaaactttaacaacacaattttgattatttaatatgcaaattccagtgaaaacttcactatatttacctctaccaattttacttacaatttcataatttgatatatcaccccaagggaatgattgatgagtacaatgttcataatcccaataatcattaggtttttcagatagaacatctgcatagactcttgcaacagaatagactctatctgacatgttttaatagatgaatgttcctctaaatggaaataaaccagctgagcattaactgaatatcatgatagcacatcaaaattctttaaaagggcaattggcgtccattaaagaaaaagccagctttaaaattttatagtcacgtgacattacgtaagcaaagaataaaacaaattaattaattaaaatttttcaattagtacacagcaattaattaattaaaataggagattaaagaatagatagtgataattaatagaagacatgcatgaagtatttgataatataatatagtataacaagacacagacatagaataagatgaaatttgctaaagtatttcaacaagccttgaatgatgaacaaataccttcagattggattgaaaaggcaattcaatataaacaattaaagaaaagaattaataaagttgttaatgaattagaggatttaaatatttataatagtgaagtaaataattatgaaattgaaataattaataataataaattacatacaaatttaaatatacctataacttcaataactaaaaatagattaattaatcaattaaataatagttcatataattatgaaattgtacctataaatgataataatgatactactagtgatataaatccatttgatgattcaattgagagttataatttaaaaatttccctattagaggatacaaaatttttccaaattttatataatgaagttgaaacacttgaaaaatttaaatttgaagaagaggaaatttttaaagagaatattgaatcaatgtgtagtataatatcaacattaacaatacctaataaaagaaataatgatttattaatttggagacaaatttttaaaatttatattgaaagtgaaattttctttagtacagttgaaagaatggcaggtaaaattgataatattgatttaagtagggatagattaatattatttttcaagaaaattaatgaaactaaacttttggataaattccataataaacaatcattaaatatttatcaaaatttaaaacattaaattttgaaattattaaagtatcgaactatgaaaaatttaataatttagcagttaaaaagatattgaaaaaatttgataagaatacacatttccatagtaaagatgtatttagtagtataatacataagaagacaagatgatattacgaatataagtttagatatttattatattataaatagtaaattattaccaattataccacaaattgatgattatttatgtccaatatgttgttcaatagcgataaagccgataagacttaaatgttcacatttattttgtattagatgtttagttaaattaagaagaaagagagaagataaatgtccattatgtagagaggaatgtttattagaattaacggttaataatttagatgagagtttatacaagtatatgaaattgtatttcccagtggaggttaaagagaaagagatggagaacagcagagagattatcaaagagcaaatgggggaaagcagtggtaatattaacaagtgtttgattatgtaacagtgaagtgcggggtgtgtatactatgctaataataataaaatatggggaagtgaaatttaatagggaaaaccctatttttaattaatgcggggaattagagtgagtggctgcaatcggattaatagtttttttttctgccgtttctccggtttattatattatattatattatattctccattttattatgtttgctatgtttgctataattccacctttttccactttctggggtataaatactgaagtatttcccccagacttttctttttccgttctgcatctactttctcttttcttctcttctcttcttcttattccttctttatacaaacaatgattaatttacttaataaaaataaagaaactgtctctgcaactccaaatcaagacatttcttcaactaattctttccaaaataattcctcttcagttgaaaaattatcaactaatgaatttgttgaaagagtcgatgctcctcttacttggaaaacttgggttatctgtggtttcgcctcattcggtggtatcttctttggttatgattcaggttatatctctggtgttatgggtatgtccttctttattgaaacttttactggtaaatctccaactgatccaggttttgctctcgaatcttggcaaaaatctttaattacttccatcttatctgctggtactttctttggtgctttaatctctggtgattttgctgatttttttggtagaagattaactattattatctcttcaattgttttcattattggtgttgtcttacaaacttgcttcctcatctgtcgctcttttaactgttggtagagttattgcaggtttcggtgttggtggtgtatcttcaacaattattctttatatgtctgaaattgctccaaaaaaagttagaggtacaattgttgcaggttatcaattttgtgttacacttggtttattacttgcatcctgtgttgattatggtactaaaaatagaaatgattctggttcttatagaatcccaattgctttacaaatgttatgggcaattattttaatgattggtttattccttttacctgaaactccaagatttttcgttaaaaagggtaaaattgatgaagctgcaaaagttttagcaactttaagacaacaacctgttgattcaacttatgttcaagaagaattagctgaaattattgaaaataatgaaagagaatctgctttaattccaactcaatcttatttccaatcttggacttcatgttttacaggttctttaagagatcaatcatcaaatttaagaagaacaattttaggtacttcattacaaatgatgcaacaatggactggtattaattttattttctattttggtacaacattcttcaggaattaggtacaattaataatgaatttttaatttcaattattacaactttagttaatgtttgttcaactccattatcattttatacagttgaaaaaatgggtagaagagttttacttatttatggtgcagttggtatggttgtttgtgaatttattgttgcaattgcaggtacagttgatggacaaaatcaaaatactgttaaagcaatgatttcatttatttgtatttatattttcttctttgcatcaacttggggtccaggtgcttggattgttattggagaaattttcccattaccaattagatcaagaggtgttgcattatcaactgcatcaaattggttatggaattgtataattgcagttattacaccttatatggttggtgaagataaaggtaatttaggtgcaaaagttttctttatttggggttcattatgtggttgttgtttagtttatgcaattttcttagttcctgaaactaaaggtttaacattagaagaaattgatattatgttagctgaaactaatgcatttacatcatcaaaatggaaacctcattatattaataatgttgatgaatttaaaccagttgctgaacatcaagaagatatttcagttaatgaacaagtttagattctacaaaatttgaaaatttaaatctttcttttactacactattacttacttacttactatttactttttcttattttaaatgcttaatgatttatgaattatgtataacaattaaatttttttcaatcttttataactatctatactatactatacttttcttagaataaaatgttatgttatcaactataaataaaataaaaagtgggcgtcgcattaaccctaagaaagaagctattttctccggaaagttaaaaaaactgagaaaactgagaaaaactcagaaaagcccaacagaaaaaactggataaatggataaatggaaaaaataaaatggggaaatggagaaatggggaaaaaataaacacacggcggaaaatatgaaaccggggaaaacaaaattaataatacggggaggtacttgtcggtgtccgtgtttgtgtcgtcatagagtcattctcagtatcatagagtcattctcagtatcataaagtcattaatagtgttatttaccacactttattaatgttattgaaatatggtgagatttatttaagaggacagtttactgtacggcattgtaacgtagaataaatgaataaatgaatacatgaactgatattaattaattaaatataaacagtaaataacgtcttacattgtaacttttttataattataacaaagataatgcaattaaaattaaattagagaatgataatgttaatgaatttgcacctgcacttgaaactctagaagttgatgtaatacttccactattacttgtacttgaaattgtattatccattgacatattacccatatccattgatgatgataatgatgtagttgacattgtcataccacccatatccatatccattgatgatgatgatgatgtagttgacattgtcataccactcatatccataccacccatatccatatccattgatgatgtagtagtaactgatttagaacctatagcacttgctgaatccttatgtgcatcaagataagttaaaactgaaaatgaatctaattgttttgttgcaactttctctaattttgcaactccttcatcaaatgatccttgggttgaatttgaacattgaccattgaaaattggtccattttcactaacaataacatcaacacaattatacatgtattcataacctttaccatctttactatttgctgcataaataatttgaataacacctgtttgattaattttattatatttagatggtatttcaacacttggtaaacaaaaattacccttttgttgatcaattggttcataaattaatttattaaaatctgatccagttgtacaattaccactaccacagaaatacattgctccaactccaaatgtatgatgataattaatttcaattggtgaaccgtttggattccattcatatcttggtaaaacagctttattatcacctccacatggtgattcagtttgtgtatcccaattagttgcatttctctcacctgggaatggaactcggaaatgtgcacttacaacttctgataataatgtaactaaaactatttgtgcaagattcattatggttatgttatagaattttcttgttgtttggttaagttatatcaataacaatttttattcaactttcataatcttctttttccatacttgttagttgcttatatagtataatatttcaactactatcatctctgaaaaattaaacgttgttggtattacgatattttttcccataatttttcaaattgctaaatttgctcatttttccattttaggtaatgttatcattactcccattggtttaaattaccaagtatccacttattattcttattgaacttattactttttcatattttcagttagtttaatagtggggatatctttttgccgcttgaactgaccaataatatatcatcattcccaaaacagtgttcttttaaacttttaaaaatgagttattttttataaatttcaaatgcttcatgaccaaataatgagttaattatgagaatattatacttattcatgactgtaatgttcactatagtaggtattgttgcacgttgatagactaatcacttgaaaatttattattgacttgataggtagtatggttaatttactttttccaaagaatgtgccaaattaagtgttttattgaattaaatagacaaagtaattatgttcttgatagctaattgaaaagtgataaagagcacatttgtttaaagcaatctactgcatagactaatcattcaatctacacactatatatagcaattggtctgagagctttttgctattccaaaacttatattcaactactatccatagtactaacttcattgctcaaatgccgttaaatttattattatcatcataaaatttgatgatacaatggaaattaagcacattgggagcatagaaatatgatataatcattttatattatagacagtaaattaagctatatttcaactaaagtgaaacaaaacatgaaagaacccatagataaaaatcatattatgaatcaaaatatgttgcaaacacggaaaattatgttttttttactcctgcccctgacaaacactaaaatagttgacacaaaagaaatatgcaacagaaataaatattgatagagttagatatcggtttcagttactctaaagaatgtgggaaaaaaagggataatcacaacaatgagtctccaattaatcaatgtaacatacacatgtataatattgttcaaattgaggcataaatagaagttcgatgtcacatgaaactatcatcatcaacttgactagaatatgtcattattgaacttattataattattattgtacaaacgtgatgtttggagtctagccattacaacaagtacatagagcaatttgattgcaaaaaacattccaaggtggtagtcagagttaaaagatcaaatgaataacaacaaaaggtagtattaagattaccatggtaaagtactactttaatcaccgaagctttaaacacttactatgaataatcgaaattcatgatacaatagagaatttgtacgatttaataaataatttacaaaataataataaaaaaatgaaacgagtataatagttcataccatttcaatgcagattgtgctaaacttcttggtcgccatgggttaaaaaaacaagaaagccctcacagtgtctacccctcttcaaaaaatgttctctgcaatattgttgaacaataaattagttaattagatgaatggaaggaactctcatatctagtcatcaagaaatataatataatgtgatgaaacatcaaatggtatatgatgcaactaattaataataatgtcatatactcatcgactctaaatcaaatcagttataagtaaggcccatgtttctgcaataagaaaatttttcgatatggttaaaaagctaatgtatatcaaaagatatataggttataaaaataataataaaatcattcatcaaagcttaattatgatagagtttctgtcaaattatttttacaatctctataagatcccaatattgtatctaataaataatggaaaaacaatgtatctaagattgtcataacttgaaactgggccaaaatgacacttcccctgcccagtctcctatcccagcgcattagggaattattttttattccatgcataattatttctcggtaaattaaattctttggagcgtacccaaattattttcatctctagaaatgatttcatatgcatggaaaaatagtaattgttatatcaattattcaattactctattattattctattattttgtataaataaacttagagttcaccttttttctgctgagttgcaaatctatcatatcgttgatttgattcctctagatcctcatcgttattgtgaatgatttactttcttttttaattcaaaaaactaataccaattatcttttccacctaattataaacccataagtgtttttaatatactttattcgttaaaaaaaggtttattttgctttaaattttgttaaattaagatttaaagtttaaaaattaagaaaaaccgttgttttttctctttgtttgctttgctcacttgaaacatcactttaaatagtgaatttgtgggggaaaccaatataatttatctatataataatcgaacaaaaaaaactgtccgagaaataaagaactgtttttttcgaatcagtgtttaattgttcaacggctatactacactcacaccctcaattaaaaattgtcgcaaaatgtcttcttcactttacggatatgccagctctaattcaaattcaaattcaaattcaaataataaaaataataatattaacaatagtatacttaatcaaccactcatgactactgttgatgagtcaataccaagggttaatcacgagaatagtttgggtaattatacaaatgacaatactattaattttatacgaaacacgccaactggtattctaaatcaaagaagaaattcagaatttaatacatcttcattattaccatcatcgttgagttctaataatgattggatggcatgttggaatagaccttataatttatacaataataccaaagctaatacatttaataatattacaatacccaagcttaatgaaaatacattaccaataccagtaacgatgccatttttaaatgttaaaccaaatccagttacaaatagaatttcaactcctactacatacaacaacaataataataataataataataataataataattttgtatttatacccccaaaccaaatgcacactccaacatcttcagttgattatcaatcaaacataagtgatagtacaatcaattcacgtcgagctagcttaatgtatccacccactccacaaacttcatcatctgttcatagttataaaaataattttttcaataataattataataataattttctgaacatcaataacaataatcaatttaatacccaacaatttaataatcataatcaatttgaaaataatataaatacatttaataagaatactattaatcaatcaattataactgaatcagttgaagaatctatatcatctttagttgctaatgatggaaaagattattatgatttaacagaaggaatatatgttaaattaaatgacatggaagcaagtaatttattaattaataaaagaattattccaatagatttatctgaatcatcaaatgaagagaaaaatgtatcaattagcaatattaccgattcagaaaagcaattgaacaaaaggaaaagtgttgataatggtgataacaaaaagtcgaataaaaaatgtaaaactgattcattcaacaaagattcatttgataacgatgatgatgaggaggaagatgatgattacgatgataacgatagtaatgataaaaacaatgagcatgagaatgatgttgttaaaaaaaataaaagatcaagaggtggttgtttaacatgtaggaaaaggaaaattagatgttgtgaaacaaagccaatttgtacagaatgtcaaagaactaaaatgaaatgtcgatggccagtaccaggttacgaacgtaagaataaatcaagaactagaccattagctaatgatgaagtttatcatgaagtttatggtcgtataaaggtattacgtggagttgtagaatatagtgtagaagaatagaaatagatatatttatatgaatagaataattttaatagactttataataattaattaatatcatcggtttttatgtttaatcatcatcttcaaaaaattttgattgtggatttttctccgattgttttttaaggatgatctatggggcgaataaagttgtataaaaatgctaaataatctatttatagtaaatggttcctaggcagaaaatgaacgtcgtgtttctatggaataacgagtggcattgcaaaatatttcaagaataatcaaaattaattataactatattgtgataaataatattgaaggggcccagacattattttttacaaaatgaagattctttgcataaggttcttccatgccaaatgaaagaaaaaaactaaagaaaaaatacgaaaatatcgatacgcacggaatctatggaaaattttttagaaaaaaaaggggcccagaaaggggtcaaagccttcttttctggataatttctattttctatctggtttaatccgtgaacgtccacacgtctatgcgtcgtttacggcttttttcggttttttttgtcgtgatgatttacccctcagattcaaagttacataagcgatttacaagatctgctgattttggggataatttattgtgactatacaaagaatcagattttacacgatcagccactgtttcatattggtttcattgctgttattattagaaatagtagcttcatataacctcatctacaaacctacactacgaaatttaatcagttcatctacatatagctcttataagtctaaaattatctaaatcaaagtaccggtataactccgacaagctagtgatatgttgacaggacgtattgtagagatagatgatttaataatttactttatgacgtataattatgttagctcgaaaataaacacagtctaataagtaaattagattagtgtttcataaattagtaccattcggggttaaaccctaatttgcgaggcgttttccgattaaaaatcatcttatgttccacattacttaaaagggtaatttttactgccgatattgctgatcagctggcattgcggttatttttgttaatttttcgattaattaattagatttaagatacataaataaaaagagactgtcccagaatttgacaaaattgtaaacgtgagtgtgtacaaaaaagataagaagttgaaaagagctgaaagtattagaaaagattggaagataaaaatgcgttaattattaattattaattgttgaatttattgtaggtataatataattgttaaaattgaatcaaattgttcattccatttaattcaaaatgttgacttcattaggagggttagtaaaagattcttttgttaaatttaagcaataaatcttacatttattaaatcttcactaaaacttattctcttctttggatatgtaggttcactaattgaataaacatttttacgtttctttaaaatacttcttaaaattttagtttcattacttgtagtaaattcttgtttacctatctctggtttatcattatttataacatttggtgatgcatgatttgattgtgaagataatgatgttgcaacagaatcaacactaaatcttctataatttaacatactttcattatcacttgaattagcagattcatcagtccattcatcattcattttacaatcaccatcaatatctttatcaattgtagttatattttcattcatgtctttattaatgtctttatttgaaaattccatctcttcttcttcaattaatggaccataaagaactgtaacatcattttctttaaaccaatttatatcagttggatttaattcttttaaacattttaattttttataccaagctctccaacaagcattctctaatctaacttgtgaagttgttggtaaaaacatcattatatcatcagtttgttgaacagttcttaatttagtaatattatcaacatttgataattcataaggtttcataaattgattattagagatatttttccaacaattatgatattcctttgatgttaaatcatatgaaaaataatcaactgcgattggaggttccgtatgtacaaatgaatctaatacaggatttgtactaataatgggtaatacattaaatttattagtcttaactgattcaataaaattagtatctaagaattgatgtgccaagttcagataatcactatattgttgtttttgcttttgttgttcactcattttcgaatataaattataaaatacacttaataaatccagttataagttaaattaatagatatagattccttgaattatgaagggtatatgttaaagacacaaatatataaatattttagaatatatatgggataggataggaaagaagagagaatattaaagtaataagtagatgagatatatgtggggagatccccaaaaaaacgataaaacagcagatagctttatagatataataaaatgatcaacaagttgtgtaaaaatatgatggatgataaaactaatagagaacgttcatcggatatattcacaataatagataattaaagtttatagtagcaacctagcaattgaaacttaaacaataggagttgtcattttccaaaaaattatttttctctcaattatagtgcggttgaattcactttttattgtcaattttattgtaataataacatgaaactgggtgcactactcggctaagaaagctccaatagagacctattgttactaaatttaaccgatagaagaattaattatttgcaatttgaattattctttagggcgttgttgttctttttctgtctatcctagcattaacatgggctaggataaataattgatctaaaccgtgaaatgaccatcaccatctttaatctcattggaatcatataaggaataaaataaaaaatttaaccgattttttacggggccttagtatctgcctatccccctcattacattagttaccataaaaaatatcattagtgttaaaaactttatctgagatttaaggtttaattaacttgcaactaagtggtattgtattcaagtcccagtttttttaaactttcttagatttaaattttcttatctttccactttttctattttttatttctttattttttaaaatctcttaaatttaattaaaattaataattccctatcttttcatttctcactaagtatttcgtgtaaggctcttaatgcatcattacttggcacatttggtaaagagtctagatctaacatgtcctccattaaaacaactggaccttctataccagctgagataaatgttctctttaatggtgatgattcaattgattttaggccttggatgttatcatcattatgatgattaagattaactgatttccgtattgaattattatattgatcctctctacacggtaaagtaaatactattattggtcataaatgcatcgtttttcatacattttgctaaaaaatttgttttattgttatctaaatgacgtctctcatttataaattcctcatacctattcggtatattcagtcttaatttttcctcctcttcccctctcgtatgttgtatttttgataaacttgtagttttgatttgttgatttaagataggggtttgaattttactatcttcaaatttaccttgagctattctagttgagtattcataatacaggttgatttaactcatcaatactgataaacttattttcaagcaatcgtgaaaatattttagcctctccataatcatcaatattaactgttaatttgtatctataattaaatctatgattatttaaatcaacacttttcccatctaatttttgtctatgttttaatgatgtgctagtattaatattttcatctttatctattccattattatttgttaattcatgctcaagcttattctgtattttattccttttaacggatctaggtgagctaatatttaatatatcatttctctttggggtattggatatacaaaccggtgatgaattaataaatttaataaattgttcatcataatgatcattactatgaagtatatgatcaactggtgatgattgtaacatttcattatttatattaccataattgaaaactttatttcttactaatggtgatgtatttaatggtgatgattgtaaaatatgaccatcacttgtcattatattactcattggtgatgatgacagtacactttgattttcacttataaacattatttcattacttttatttttttttctaattgaaggacttttataatttgtatttaattcacataaaacacctttaggctcatctttacgatttttcaaatcttttgttggacttaatttcatcattggagttgattgaaatcctttctttgcaatagcttcactttgctctgatgcgctactttcttcagtagaattgagttttaattgaattgttgattctccaatattagatactggctggttcttctttaatgcaggacgtcctctgcgttttttcgttggtgtaaatgcagtatctaatgacatgatttatgttatatcatacaagttatataataaatagaatcaaatgaaaaaagatctcctagtatcagtaacgaatcaaagatgtctcagctgagcctggaaagagatctaactcaagatgaattataaatttaactaaatttaaaagaaaactcagactctatatgaaaatataatgtgaaactaaaaaatgattagctaatgcgaccaataacttttcctaattaggaaggttactttgttattactataaattattaattcattatggaatggatcagcattgatcgaccttctttaggttgctacagacattgttgcattgccacctacttcacaaatagtaaatgcagaaattaattgaagactggttagctatcgatgttaaccctactactcgtgcacaaattactgaactagctaaggatacagtatccaactatgaaactctcaatgacctgttaggtaaaaggatagtgtttggtacagctggtttaagagctagaatggaagcaggttttagtagaatgaatgatgttactgtattacaagcatctcaggggcttgcagaatacattaaatcaacagttgacgatagtgcaagtctttcaattgtcataggacatgatcatcgatataattctaaaagatttgcagaattagcaattgctgtgtttataagtaaaggatttcaagtatattatataggagataacaattgtgcaactccaatggttccatttgcagttgataaatattctacaaatggtggtataatgattacagcttctcataatccaaaggatgataatggttataaagtatattggaataatggttgtcaaatcatacctcctcatgattctaatattcaaaactctatattggaaaacttaacacctatattaaataaagatgatggttggaatactgatatttatatgaaatctgataaattgatttactgttttgaagaagttgttaattcgtatgttgattttttgagaacgagtttgtttaaagatgaaaataaaattgacttcaaatttgtatacactgcaatgcatggtgttggttatgaatttgttgaaaagttattaaaaggtgtcacaccaaatgaaaattttgttaaagttgaaggacaatgttctccggatcctgatttttcaactgttaagttcccaaatcctgaggaaaatggtgcattaaaagtagccactgaaactgcagataaacataatgtcaatctagtacttgcaaatgatcccgatgctgatcgtttcactgctgctttcaaatcatccaaggagaacaaatggattcaattatctggtaatgaaattggtattttatttgcagactatgttatatcattacaggatccttcaaaattagataaattatatatcttgaactcaactgtttcctcacaattcattggatcaatggctaaaaaattaggatttaattttaaagatacattaaccggtttcaaatggataggtaatgaggctattgatttagaaaatcaaggttttcaagttccatttgcctatgaggaagctatcggatttatgtttaaaactgtacatgataaagatggtatggcagcacttttaatgtttttacaactttatcaaaaattaattaaagaaggtttagatcctgttgctaaattagaacaattatatgaaaagtttggatacttcaaacaatataatggatattacattactgaaaaaccgaatacaatcaaggatatatttgataatgttataagatcaaatgattcatcgattccatatcctaaaacacttggtaatttttcagttattgaatggagagatttaaccatcggatatgattctactactaaagataataagcctaaactgtttgttgatcctacttcacaaatgatcacttgtacattagcaactggagctgaaaatgaatctataagattcacagcaagaggatcaggaactgaacctaaattaaaggtgtatattgaagcacaggcgtccaatgaggtaagatcattacaattagcagagcaagtgtgggttcttctcagagaggagtggttccaaccaggtaaacatgaacttattgaaagaagagtgtaagttgatgtatattattaatttaaaataaaacaagttaaaaataactacgtaattgaaaaaaaagtgaaaaaaaaaaaatctttgtttacatgtttttgtttcgtttttgatctttcggtttgaggaaaaaaattggcaatttctctctcatgtgacggctgttatagacttatttaacgttttttatttgtagatttaatcgtaaactcttcaaataatcactagatctctattgaatcactctccagcaatgataatgcgagatacctggaaacgaaagaagtcagatttaccattaactatgaacaataatgatatctttaatcctcgtagaaagggtaaaaatgataaaagtcttgtatataaaatgctcattggtggttgtattgcactttttgtgttttgttatacactttcatctacatgggggaaatctgttgatattagcaacattcctgaaaatgatataaatccattatatgcacaaaagcaaaataatttaaaacttgaaaatcaaaaattaaaggataagttacaaagtatagaaaatggtattgattcattacaaaatattgaaaatgatgcaaataatgcacttgcaactccccctaatcaagatgagcaactgccttatggtgttgagttttatgatttaaaagattatgaaggtacagttgatggtaaaaataatgaagaaattgttttacttttaattcctttgagaaatgcagagaaagttttaccacttatgttccgaaatatgatgaacattacttatagtcataatttgattgatattgcatttttagttagtgattgttctgatggtgataaaactttagaaactttatatgaattaacagctgcaatgcaagaaagtaaattaataccgattttagaagcaaaggaaaagcaaattaagggtaaaggtgtttttggatcaagtgatttatatttaaaatatatgcctaaggattatattgaaagtgttaagaaatcatactcaccacctttccatagtgaatatgagaaaccttttagaagtattcaaatttatcaaaaagattttggacaagttattggtcaaggttttagtgatagacatgatattaaaattcaaggtattagaagaaaattaatgggacgagctagaaattggttattatcaacagctttaaaaccttatcattcatgggtttattggagagatgttgatatcgaaatttcacctggtgatattcttgaatttatgatgaaatttgcaactgattttgatgttattgtaccaaatgtttggagaccattaccaacattccttggaagtgaacaaccttatgatttaaattcatggattgaatcaaatgaaggtttaaaattagctaaatcattagatgaagatgatgttattgttgaaggttatgaagaatatgcaacttggagagctcatttagcttatattagagatgttaatggagatcctgaggaaataattgatttagatggtgttggtggtgtttcaattttaagtaaagcatcagttttcagacatggatcaaatttccctgcttttacatttatgaatcatgcagaaactgaagcttttggtaaattaaccaaagaaatgggtctgagagttggtggattacctcattatactgtttggcatatatttgaaccaagtgaggatgatttaataaagatatcgaaaatggagagaaagaagagaagatttggtagtatttaacgttgttcaagttatatttcgttagtttgtataatttataatttaattcctaatttaattttaaactaattacagtttattaaaatatggattatagtaaaattaattatacatttttatatgggtattataaaaaaacaatgtaaatgcatgcaaaaataacgagtggataataatagatatgattattaatgattgatgtaattctaatgtaacttttatttcatatctattataattgagtggtatacaaaatgtcttttctgtgttttattataagaatacggctgaaagtaataaatagatacaattattaactgatctactaatattagcactgttagaatgacttgaaactgatgctgttatgctttgagttgatgatgttgaactaactaatgttgaactaactaatgttgtttgaacgtcatgttcaagtgtagaatcagatgtgatcggagttgttgtattttttggtgggttaacaaactttatgttattatttctttcagctaatccaataagttgattttcataatcaaattcaacatatttatccttcatgaataaaatgcctaaaatccatgcaccatcggcagttgaatcaagtccttgaatattgctaatacaataaccatgtaaatcagtatcagatccatattgagaaccaatgtacatatctggtgttaaagtccaatttttatctgaaatttcaaatataaattctaaagttgagttacataaaatagcgtaattttgaccatcagtaattgaactatcaaaaaatgaatgtaatctatttgcatcattttctgataaaactagtgaagtagtaccactatctaacaaaccaattcgtgaagtgttactttgctcaccattaatttgaattgaatcaaaattaatttgataatcattaacataaacactttcaatctcaatttcccaatgactaacagcttcttgaatgattggtgattcatagatatcaccattatgtaaaatttcctttgttgaaccaaaaaataataatccattattttcagtatcactatcataatcaccaaaacaaatagtgaattttgatgaatcaatatcaccattttctgataaaaatgagattgcattaactaaaccagtattagaagtattatcagctggtaaacctaagacacctgagaatccataattttcgaataaatcgggtactttatcagcaacaccaaatgaaaaattatgagtttcaaaacctccaataatgattgcatcatcatagatcaaaccagatgcaacacctgaatcataagataatgcaaaagtaccatttttcaaattagcatcattaggatcaaataactttttatctttacatgaatcatcctgacaatcagtagaatataaccataaatatggtgatcctgtatcaattaaaacaggataatcttttgcatttaaagtgatgtttactgaatatgcttgatcctcattatttgaatataaatatgacatacctgcagtcattgtctctgtttgaattgattgggttaaagatgatgactctttgatttcagttgttgttgtagatgcatttagattaagtacaccttgtttttgatgtttaatgaatgatggtggtagtttctctactacggagacataatatgaattatctgagtctacatatgctggatgaattttgttgaatgcagttgaaaacttggccagcaagataaaggtaaatatttgtttcagaaacatttctagtattttaaattgtgatggtgaaatgtgtgttatatttataatttagaacacggggtatatgataaataaaagatatttaacagggtaaattgtctatttatcaggttcaaaaggctagaaataaattgatgttagggagggagtgtatgaataacaagacaacaaaaacaactaatggatctatatactattaattgatattaatattatgtgttaagttaaaaaataaaaaataggaagaagcaattcaaatctatatgatgtccaagatggtcaaaatgcagaagacagctcaaatttattttttttcagtactagtctagtatcttacgaggttgtttagttgacgataagtccaagacaataataacatccgtgaatttcctcgtgaagaaatagattctaacaatgccaacgtgtgcaagagcgtgttgatgttttccttaaagaggaaaccgcgttggaagtcttacctaaatagatgatgtcatcagttgatggctttttatgacagcgtatttgttgtggttgggtacatgattctgacaaattaagctttaatgcttcattttaagctttatgtttgacatgtctcgtaaatgtacttgcatagtcatcatttgctgtgcattcggctaacactatcactatctcgattaaaagcttttactacagtcacatgatatacataatactaagtatatatcaagtggaaagagaagcggaagtttatactttccttatctcaaactaacactagtaagtccagccaagtcttccttgctaaagtataaatcagattcttctgagaatgttacattttaaaactttcttgattccttttcaatattggattcccttgatccatataattgtcaaccacgatgtcttctggatttttccatctaaataattgagtgtaactatcccccttatcttcaactcttgaaacaactatcttaccttaaactggtaaatccatgtgctgaatcacccatttcagtaatttacttcttatattcagaaacaaaatcaataataaattcactattgataacatcagtataccaaattaattttgatcttaatttaaccatcatctaaagtttgtggaactgaaatatagctgtcaacaattttctttaaatttgaatattcaacttgtctagtgttagcttttaaagtaccttcatgttttttatttgaaaaaaaatgcaaatccacctttactatcattagaagagcttaacacctttcttttctaagagaatcgtgacatagaaacatgctttatcagcttttatcgttctaacaattgaatctaatgtaccgaaaacactagtaagcttatttctcttctttaaatctccgatggcttcaatctttctcttaatatcagtaagtttagctcttaaaagatcttttttggagttaatattatattgggtatttcttcatcctagttcagtgaaaccttctaagtttgaaagtttaacagcaactaaagaattgtaaattgctattgataaaacttgctttatcttcatctgataagttttgaatttctttattccttgaatcccaaatatctaaagcatcaattgcaagttgaaaatacagagttcttattttcatagtaaattctgaaaaatttattgatattaccactatatacggccttacttaagttaattgctgatgataaaccaaaaacaccggagccaacgataataatttttgagtcttttgagtatgacatttcactaatctttgtttgatttctttgattcaaaataaaacagattcaaaacaatacaactgattcactctttccgctattttatcttgtggttatatatcaatattcttacatgcgatcagtaaaagttgaaagatgtcagagaaatggtgtgaactttccccaatagagatcctaagtttctgctatcaacgtttcggcgcaaaattgcctaatatggaaatggatctgctgctagcattaataataaaaaacactgctaagtctgttgtaggtgcttttataaaagcaagaatacgcatattattgatacataattactatcactaaagattataaggtaatttcaaaaatcattttatttttgatactaagatcattcgaagaaaatattaagtacatttttcagtgaagtaatctattcactgataagcaaagagaagaaaaaccgtttttaaaactgtggttccaattatgtaatcggcggtgaaaaaatttccccattaggaacttttttttccaacgaactaaattgtcgttactttttttgggtataattttttaatcctaagaacacttttgaaagataatattgaagtcagagtttggtgattcttgtcttgccaatactactccgttttataatatattagtaaatatcatttaccaaatcacgagaatggcattatcctgttaaaaaaattgcaatcattggtggtgggccaagtggtctagttgcattaaatgaatttttacatacatcatcagatggtagttctaccataactagttttcaaaactgttgagaatgttttacctaaatcacctgcatttgatgaagttattgttttcgaacaaaacagtgatattggtggtgtttggtcacataattatgaaactgatgataaattacctgaatcaaaagacttcttatctccgagaaatattagacctgcattaagttgtccgactgaagaagaactttaaatcattctaaggaaaatccattaatcaaacaatcagaacctgttaataaagataaattatggagtagaagtgcagtttacgatcatttattcactaatgttccaaatagattaatgaggattttcatcaggttttgatatagaagttgaaggtactgatgaaacatcaaatatcttctatcctttcgttcctcatgttaaagttttagaatatctaaaaaaatatgcagaaataaacgatttaaagaaatatgttagattcaacactgttgttgagaaagtttataaaaaggatgagaaatgggttgtcactgttgttgaagttgatttcttaacaggtactcaaaaatggtatagtgaattatttgatgcagttgtctgtagtgttggtagattcaatgttcctttcattcctaatattgaaaatcttgatgaatttaaagctgctcatccgggtgtaatttctcatactaaatcttatagaaactccgaagaatttaaaaataaaaaggttttattagttggtggtagtatcagtgcaattgatttgttacaatatttcttaggtagttctaatggaagtttggttatctactaattcttctaatgttgcctctcctgaaggtgatgactggatcagtcaaatcttaaatgacaaatcattatcaatcaataaatgtccaagaattaagaaatttgaaggtgataatgtgatatttgaagatggttcaattggtgaaggatttgataaaattttatttgctacaggttaccatttaacttatccattcttagatattccagaaaataaaggtaaaggctacatcagtattagtagtggtagggatgatcaaccaaattatgcgaaaacctaaagttgataatgtttactactatacatttacagttggagaacctactttagcacatattggtattttacaaaatccattatttttcctagtttctgaagttaactctgctgcaatggccggtgtatggtcaaactctaaaaaacttccaagtattgaagaacaaaagaagtggtgtgaagacagaatcaaaggtaaaaaatcaggttttcaattctttgatgaaaattcaattattccatatattaaatcaatttaccaatttacaccacgtaatcgtttggatattttaagtatattgaagaaagatgaagttttggcctctagaaaagttcttaaaactttgttctacaaatatgctacacgtgaacttgatgaaaatgacgaatagatgtataactgtacattttttagacttcataatatttacatatattaacattaaatagttataaactttgaactttctcttcaaatcctaacattaaggtgccacagttttcaaagtttacaaattaggcaactcaacttcgcaatttaatatttttccggcaatgttattgcatcaactgaagattttttgatattttatattaatttatactatctcgataagaataaatacttttgcaagagaaactaaccggatcgtcacagtggatgggttcggaaagtaaccaaagtaaattgtgattattagtaagttgttgagttttgttttgtcaaaatgaatggttattctggaactgtcctgttcaggatagataaaatgaaaaagagtaaagctaaatcatgttcaaattgtcgtaatagaaagcgacgatgcacacgagaagaaccttcatgtacattttgtttgaaaagaggtctcacttgtaattatgccatgttaaaagaacctgaatctgatttgaaagaagctgcaaaggtgttggttactttgaacccaaactaatgatcaaaatacatcaaacattgattcaaattctaaaatcatatcttatccttcaactaaaaatcatactttgatggaccagaacaacaatattaataattatgctgatccacgaaatgataatgataatcaacttgatgattatagcgttgaatatagtgaatctgaaatcatataatgatatccataataataatggtaagattgaagataaaatttctagtagaaaacacgataatgaacctaatcataaagataacttaagtagaactttcagttccttatgttgaaaaagaaatgcactattcccatcaaacctattcatacacgcagaagaaacatattgtggaaaatgaatcaactgataatgtctggcacaaatctaaaagagttcacgttgaaagttcttgcaaggaaaataaaggtttagataatacacctcgtaatgtgaatcatgtgaataacccaattaataatatcaataataatagtaacgtcaatacgagtcctgatatattgagcaatttagatccaactaaaagagtaggcccagtatttacaactttatttaatccatctatcaattcaaaagaaagaggtgttgaagtggatataaatttactaataaaatatataccagataaaacagaatctgatatattagttgcaagatatagaacttcggtacatccattaattccagttcttgatttacaactgttttatccgatttatgaacaattttgggtttctaaatcaacaaccaatttatcgtttttggttattttattcacaattttttatgcggcatctgtatccttgtttgaggaaagaactatcaaaattgataaacatgttaataaagatgatttggttagacaaatgaagtattatatggggtgtactgaaattgcattatcaatggctgaatatccaagaaaaatcagtacaataggacttcaagtttcagttattctttacactttagttagaactgactgtcgaactgatgattttttatctatttcatcattggtgagatgtgctcaatcacttgaacttaatcgtgatcctagtaagtatcataaaatcacagatgcaaaagaattacaactaagaaggatattatggtggcaagttttatacttggattgtactacttcattatcaacaagattatcaccattggttgatgaaactgaatttgatacacaaatgccaaatgaatataaaagaaatcacaatggagactttattttggatcaagctattgctttctttaatggtagatgcaaatgggctaaatgttgtaccaagattttgaaatatacattcaaaataaaacctagttcagatgttatgatgattaaaataacgagagatattgagcatttatcatttttctgttcatcattaattcaaagaatgctagatcctatcaatattcagccaactgaggaaaaatttgttactttttcaactcttgttttgtcaactttagtggatagatgtcatatattaataagtattttatttaaagagaaagaggagactcaatcgactctagaaaattcacaatctaacaaattatatttaaacgaagttgatgacatttcatctgtctcagattctgttactgtcaaatttaatgaggatgttttagaaaatcatattcatttgttaaatgaatttattaaatatggagaaatgccaagattttctattttcatttgggaaatcagaaaatttcaaccaattcaaaccttactttcactgcttagatgtattattttggagattctggaatgtagtattgatgataaagatcaaatacaaagggtaattgagagattgaaaagaagtaaaagtgtgaaaattattgatgaatcaatagaaaaactatcttatttgtctgaacatactacagcactttgctttcaaagatggaataccttgtttgaacttaaaaaccttagcttggaatttgcttttcaaaaagaatgaaaaagttgctaatccagaagtattgagaatttctggtgatgatgctattaatgttgctgatgataatgattgggctgaattgtatagagatatgaatgagattgagaatttgattgaggaaaacattaacttatgtatatgggatgatacttcgggtcattaccttgtttaataatttatagattaagttaaattttatggtaaaattccttttttcccaaagaatttaataatgaaaaaaagttatgacgacaatacatttggacgatgtatttggtatgagcgttataaaaacttgaatgatattttaaccaacaagaaaagcaatcataaaaaataaaaactaaaaaaaataaaataattttacatttttcaagtctgttaaacccaacatcagaatttcaacctttggtttgacaatttgtttatttttatccttgacatcaatgaaaattataatctaatgagattgcaaattcattagtcacgtgacctcactatattatgactctacaatacttagtgaaggcttaaaataacaactaagtggtcggatggtctagttggttatggcatatgcttaacacgcataacgtccccagttcgatcctgggttcgatcatttaacattaatttttttttttttttttcaaattatttttatcaatatattgaagaatcaatattaccatctttaatgctaataaagttctaaactatattaattaactacttttttttcaatggtatattaattgatatataaaataatcttttcaattttataaattaaagtttttcattctaaaagttttttacaattattaacagattttgtaagtaatctacctgcaatactttcaattggtggaactgaccatttatcaattttattatcatcttttgataaaattaccttcaataccatttaaaacattattaacatctttaaaattaaaccattgaacttgatctaattctttatctaattcagtattaatatttgaatcattaatttgatcatttgttaaaataccaatacaaccaatcattaaatttgaaggatatggccaaggttgactttgcataatttgaatattctctaattttaattttaatccagtttcttcataaacttctctaacacaatgtactttcgattgtttcaccaggttccataaaacctgcaaaacatgaaaacattgttttactaattataatttcattaccagttttttcatcaagtaccttttcaattgttggtggatgtctctttctattagcacctaataaaattctaccattttcatcagataatgaaataataacaactggatcagtacgtggaaattggaaattatttgatgttaaatttgccttacaaatttcattatatggtgaatcatttaaacaatgtaattttgaacctaattgaacaggtactacatgactaccacatgatggacaataattattcttatttaaaaattcaataaacattttacaatatgaatatgcacttgcagttgaattatcaataactaaaacatctttcataccatttgaataaaaatatttattattactcttttttataatttcttcttcaacaaatgaagagagtatttcagatttagttatatcaattgaataaattggattttcattcccattaatgttagtgaaaacattattatcatccatacctaaccaaaaaagtgaaattttatttaattcgtcattaatttcattaaatttgatagttgatttttcttcatcaatttcttcttccatacgtatattatatttaatccaatcatgataaaatttgcttgaaaggtggataatctttaacatttaatggtattaattcatttttattattatttgaattcaataaaacttcaagtctattaacttttttaaaaattattaattttgacttatttaaagaatttaataatgtttccatatgtttagcatctcttcttaaatatgcatatctcagtatatgtttattactaccaaagaatatatctttcataatgtaatttgatttgattcaagaagagaaagtatcaagttaagcttagtaatcagcgatggagcgaagtgggaaatgtgcatgaatttgaatgattcacttaaattctctccgctgattagtcttcagattttagattttagattttataatattaaatattaagatgatgatgatgatataaaaacttgcaaaaatatatataatagacaaagatagtacacttctctatcacgtatatacatagtagtataaaaaaaatatgtatatggaacatgagtacttgttgaaacaacaaatatagtacgatcaaattgatcaataaaataccttactttaatttttttattcatcagtaattaagatatataatatatgcatagctagttttccgataagtgaatttggaaatttcttatatttttttattaatcaagttacttgcttgatattgacaagatttatgatcgtttatgaaatttaaattggaaaaatttcataatttattattcttcagttagtcataaccaagcaggattattattattattattatttgtattattgttagcatttgctggagaatttgaataaacatttttattttgttgaacattagcttgttgttgtccctgtccttgcatataataataattattttgattttgtgttgcttgagattgttgaattctataagtttgttttaattgattattagcttcaatatcaggaacatgaacagcttgattttgttgttgttgtaaaagtggtttaacttgttgagatgtttgttgagtttgaacttgttgttgttgttgttgttgttgattatcttcaacttgattattttgtgcattagctgttacttgttgttgttgttgttgattttgttgatttgttgattttgaacagtaaatttataaattgtccaatcaaagatataatcataaacatatttatgtcttaaaaataaatctctaaaacctcttctaagataaatataatcaggtttatcatcaaatcttaaagatctaacataattaagataatgagtaaattcatcaggtaaaccttttgttaaaacttctgcaggtattgtcatttttctttctaaaattctatcatatttttgtcttttagttgcagcttttaaaccttgccaaggtaaagtacctctaaggaaataaattaaaacataacctaaactttctaaatcatcccttcttgattgttcaatacccatatgagtattaattgaagcatatctagcagtaccagttaaatttttattttctctataaggtatatgaatatgagttcttggatctctaaattttttagctaaaccaaaatctataacattaacttgagaaccttttttacctgcacccattaaaaaattatcaggtttaatatctctatgaataaaatttctagcatgaataaattctatacgacaaagcagttgatcagctaataaaagtacagtttttaaatgaaaattttctattacaataaccaaataaatcttctaatgaaggacctaataaatctataaccattgcattaaaatcacattcagtaccataccatctaaggaaaggtataccaacaccaccagataaagctttataaacttttgcttcatattctaattgaggatgttttgctctaatactttctaatttaattgcaacttcttcacctgatataatatttgtacctaaataaatatcaccgaaagaacctgaaccaatttttttacttaaacgatattttctaccgactcttaaatcgacattaacttgatttggatccattttttatttctaaagattggaatggaaatggaatggaaatgggaggttaggatataaatgagatgattatgataaaattttaaattgatgaaggatatattagtaataatatgaaggatggtaatataatataatataataaaactaattatatatactttactactttggatataagtaagttaatcaataacagatataattgaaagataataataataataacagtaaatacaagataataataaaagataaacagttttgttgtatccctctttttcaatttcaattcaatttcaattttattcacctctttctctttctccttctctttctcacttgaaaatgaaaatttcttaaaatactacaatactacgcttattgaaattaaaattatttatcgtcccatcgtcccatcgtcccatcatcagaccatattacgtaagtatattaatattaaattaaaatattaaattataaaattgagggtttccttaatcatttcagtcttccatttaattccgtgattgtggagtcattttcacttaaagttagtatactatatactattgttatttattattatcattatcatcttattattattattactactattagtattagtttcaatctatttgtatactatactacactacactatactttactactataaataaacaatttaattcaaaaaagggtagcaacagttcaaagatcatcaataaaaaaaaatattcatcaaatttactaccgaatacaatagaatttcttggaaaaaaattttttttttaacattttaaggtttcatattaaataaattttttttttgttattgtttgagttctatttttatttatgttttctttcaacagttatattatttatgatgacattataattataattataaaattataataagttaatactttaactgtcaaagtaaatctatttaaaataactcagagttcactataaataactcaacgtttccccccttttctattttttttaatatcatcttgcatattgtcttatctttctgtatatttaaatatttacttttcttttcatttctttttttttcctttattgtaaccatacaaaagtaaattaaaaaaaaaaacatgtctactgaaactcctgttgaaacccctgttgaacaacctgttgttgaacaatctgaatcaaaatcatttgttgaatcagttaaatctgcttcaaataaagttgaagaagaaattaaaaaaggtgctgaaactattaaggaagatactaaagcaactgctgaaaaagttgaaaatgaatttaaatcttcttcaaatcctttaaagaaagtttcaaacttctttaaaaaaattttcaattaaggaagtttatctaaatttacatctattatattattgtaacaatactttagaaaattttaatctaattttaattttattctctttctctttttaatttccaatttaatacttttttaataaataataatatattcttctaatgctatataataacttaatacaataataataataataattttagtactttaacattctagcaaaaacgcctcattcttatctattaaacacaatcgtgtgacacaccccttaagtcatcggctttgttttttcttgtcactctaatatggattttatctttaaattaatcttctattattatttcaagccacatgtaatcacacccaaaatatactgttatcctgatcgtaatctgatacaactatacttattaacttctacacaaacatgtggtagcaaactatgcactttataaggtgcttaacactttatcttttattacgtaataacaatccatatcaactcttacttaattcacaccccatatagtatatcaggtataaaatgattatttagttatttatacactacctcatacacttcttaactataataatcatatcattatatacagctaataatagtaatagtaatagtaatagtaacttagtcaatatccccccatcaaatagacgcgccgttctgccaattttaaattacgtgtaaattttcaattaaatttcaacattttttttccaacatgaatttcttaatgaaatcttacatgaaagatagaataatttaattaacattttataatttaaatatcttgtttataaaccaaaaggaatgcttgcatttagatcattatctgcacaacgtgctttttctacaagctctattaatttagcagctgcagttgcaagaaaatcttttaataaaaaatcatcatttgataaatcaaagaatagaaaaggttcaggtaatgataaaacttttaaggcaacaattttaactaaaaattataaaaattctgctaaaaaaattgatgaattattaattgataatttaccttcaattaattccgaaaatttagatttaattaaaaataattttgttaaatatccaattgatgttataaaaaaattacatattgcaggttcatttaaacctgatcaatttaatgaattatattctcaacctttaactttatttcgtgaaattgaagattctaaattaattgaaattattaataattctaaaacaaattcttcattaacaaatagatttattattaatggtcaatcaggtttaggtaaatcaacaattttatcacatttccattcatttgcattatcaaaaaatgaaaataatgcaattcttttcccaatttcaaatgctgatttattagttgatggttcatctgattataaattaaatcctgaaactaaaaaatatgatcaaccaatgtattcaaaaacttttatacaaaaatttaaaaatttaaattctgatatattatcaaaaatacctttatcaaatgaaattattccaattaattctaattataaaccttcaaataataaaattaatggtactttattagattttgttaattattcattaaaagcatcagcaattgaaactaattcaacttttgcatttaaaactatacttgaagaattatcaaaacaaactgtactacccgtttatttaacaattgataatttttcagctttcattcaacatccattaactaaatatagaaatactgataatgatagaatttatttccaagattttacaattgctgatttattattaaaatttgtttcaggtgaaaaatcttttgcaaaaggtgcagtaatggttgcaacttgtggtaatcataaattaaagagtaatggtacattagatgtaataacaggtgataaatcaattgatgaatttgcttattcaaaattaaataattttgattataaattagcaaatagattattacttaataatggtattaaaaaatttgaattaaataaattttcatttgatgaatgtaaatcattagttcatcatttatttaaatttaatttagttcataatgaatatgatttagaaaatcaaatttcattaagtaatgaaagtatagtttatgataaaattgcagctcaaaaatatttattaagtggtaatggtaacccaagattattaatgaattcttgtatattatcttatgcttagttatttagtactttacttaaccttttataaacattaaaatgacttgtaaatataataatttattgtaattccggtttactttttgtttccattctttattctaaacattcatttatatatgtgctattaatacaaaaaatctatctatgcttcaaatccatcagaatgataaacatcatcttcatcctctacaggtggtggtgcttcattattaattcttttatgattttcatcatgattttcatcttcaatctttctcttatttgtcggtatactatgatggttaggattatgatgagattgttgttgttgttgctgttgttgataatgtctttgtttattcttttctcgaatttcccaattttccttcattttaggttcaagttcaattaattcatctcttgtaactgaatcttcaattgatttcaaaatttttaaaacaacattaatatgattaccatttaatttatcatctctaaatcttaataattcccaaacttcatcatttgtttgtctacattcaccaattctaccattaaatgattcaccagattttttcatttcttcccattgtttatcacttacaaataaatcatcataaatatcataatttacaaaagaatttttatattcaccaccatttcttttaatattattttcaatactttcatttttaaatggatcatcaccacctttccaaacatataatttaaattttggtttactatcataatcagtatattctctatttggatcatgttttggtaatgaatcatctaaaacttttgggaattctaaaccaattttaaaatcaattgtattctcttctgcaggtttccattttaataaagttggatcagttcctggaatataaggagaatcacatgaagttaaaattaaaccatctgaaacataagttaaatttttcatttcattgaaaattttatgaattttaaaaggttgtgtcatatttttaaaatctaatttgaatgaccaatttttacatgcatcaggaaatttcctacgtaattcattataaggtaaatgaaattcttgttgagcatgatataatcttttataaagatttttatgcattacactttgcatatccattgaaagacaatcaaatattaaatatctaacttctttaattttagtaattggatttaatgaataaactaattcaccatcaattattgtaccattatgagatttatcaaaatctttaatacttcttgggaaatggaaatcaggaacgtgataatattcattctctcttgaaattaaaaatgtaccttcctcatttgtatcaggattaaccaatacaaataataaaactcttaaaccatcacttttttcacaaactaaataatctctctctaataaatttttatgtaaatgttccctagtaaatgaaactggttgagaacctgggaatgaattatatcttgtacgaagtatcattgtaacttgttgtttaagataagtttccacatctggggcacatctcttccctggtatattgggcacacctctatcagccattgtctataatattcaactataataccgtgtcaacatgatttcataatgtgtacatcagagacagtaaaaagagcattaaatacaaatttgggaaatttttcaatttccgcaccagtttcctaattaggacatttttgaagaggaaggtgaaagttatttgaaattgttaaaaatacagtacaagttgtattgcaaattgttgtattttactttactttatatgctgaacaactaactagaattgaatttttagctttagtatagtttatttgttttctttatttattgctttttcttaattaactacttgctttttcttaattaactaaaaagttttaataatgtctgatgcaacttctgaaccaataatggatcagaataatgctgcaattgaaaataatcatgaaaatgaaacagaaccacaacctcaattacaaactgaaaataatgaaattgacctgatacctgatgatcatgaaaataatgaactcgataataatgataatattaaaaatgatacagaagaatttgatgatgatcttgatgatttaatgaatgatgcaattaatacaattgtagaagataataacactaatgaaaatgaaaatgaagatgaaaatgactctgattatgaatccaataccaaaaacttatcatcacaaccaacagcatcttcctcctcatcttcatcatctgcaagacctaaaagaaaaaatacaaagaatgtaaattatacagacaaaggaccatcatttaccacattaaaagttgaaaacaaacgtggttcaaaatcacgtcgtggtaagaataattcagattcttcatcaccaggtccacaatctactccttcaaagaaaatttcatattatgatgttgaagatgttgtaccaataaattatcaaccaccaattttatcaaatgataattttaatcaaattgttgattttaaaaatgcaaaaattgataaggatgaaatatcgattactttaaagaatggtttaacaattaaaaagggagattgtatttatatgatttgtgaacctccaactgaacctttctatattgctcaaattatgggatttactaaaaaggataaaaatgcaacaattaatgatgaatcaaattatatgtttagtgtttgttggttttatcgtccaagagatttaaatagaagaataacagatacaagactggtctatgcttccttgcatcgtgatgattgtcccttaacaagttttagaggttttgtcactgttaaacataaatctgaaattcaagatattgaaaattttaaaaagcaaccagatagtttctattttgataaattatatgatagatatatgataaaaatgtatgatatgataccaactattcaattagttcatttaccttcaaattactataaagcattacataaaagatttgaatttatatttgttgaagttggtaaagccgatgaattattaagttctcctaaaaattgtgaaaaatgtttacaatggtcatcaaattcagatgcaattatgtgttctggttgtcaaaaatcttatcatttcttatgtttagatcctccaattttaactaaaccaaagagaggttttgcttggtattgcgctgcttgtaataaagaacttgaagataaacttgcagaaagtagagggaaaatgttggaaagttcacaaccttctcaaattatcaaacaagaaaataggttagcaatgatgaaagaatctgatcaagatgaaagtgaaaataatgcttcaagtgataatgaagaaattaacagtaataataacaacactaataatgattcaagtttaaaatatgaagaaatggcaaagaaatttttagaagatgataaaaatattactttgaaaagaagaagagaaattgaagaatggccttatagatatcttggtgtacatgcaaaatttgaagatgcattagatttacaagatcgtccatatgcacgtgctgcttctagattaggatcaaaatatcaatgtacttcaataaccaattggtatgatcacaaagtacaatattatgacactgattctaaatcattgactaataataaacgtttaaagaaatattacaatcgaagtaaaaagtcaactactccaatacctgatgaagaagattcattacaacagaaaaaattcccaattcctgatgaatataaagatgttaaaccaaaagatttcccaggttggttacaaccaaaacctaaaggttatatagagagaggtactgatgaaactagtacgttattatggaaaatgccaacttgttcatccgatgatatgagattacattatgaaaaattagttgatgattatattaaaaaatgttcaagtgttgctcaaagattaaaattaattactgatacaactcctaactttattgatgctattttactaattttgatgagacatgattataaacctgaagaatgtatggatgatgtgaacaaattaactagagaatcattgaaagaaccaacatttactgatgaagaagttaaaagatttgaagattctgtcagattacatggtagtgaacttttcccagtgtttaaagatgttagaacccaaccttgctctatgattgtcagattctattatttatggaagaaaacaaagaatggtcatgaaatttgggataattttgcaggtagagctaagaatagattgaaaaatactaaaaaagttggtgttgatctcgataatcctgatgatgatggtttgttttcttcaactaaaagtaataaaaataatgtgtcacttaaatgtatgtattgtgaaacaaatcatagtactcgatggtttagagcacctggtgctatctttgatgaagaaaaaaatatgtgtgaaggtttatgtaatagatgtgctaaattatggaggaaaatatgcaactaaatgggagaatcctatcgaattaattaaaaatcaagagaaaaaagctgcctatgctgtaaagaagaaaacagaatatgcattaattgaggaagctgaattagttgttaaggcaagagaaaactataaattgaatccacttcctactacttcacctttgaaaaagtttaaaaccattgatactgattataattataatacagatgaagaacctcatgttgaagtaacaaagaaaaaagtatcgagaaaaaaaccaaaggagctcaaacaggcaccaactacacaagatgcacaagtgtcatcaacatcaaagaaagtgacggataaacttgtaataaagagagaaagcaaatctaaaggcaaaactaaagaacaaagggatgctgaaaggagtggaataccggtggattttgctgattttgttgcaaatggatttactaataaaagtaaaaggaagaaacgcacaaaatccggagagaaaggaaccgatgaaaatgatgaaactgttgataagaaagaacttgttcatgatgataaagatcataaagatgaagaaaagcttgaaaaaaattccttctgatgaaccagtaaagaagaaaagaaaatacatcagaaagaaacctattaaagataatgaaataaagtttgtttatggtaaagttgttgatgtttttgaaggtacaaagaaactgactgtgaaaaagagtgaatgttacgatccatctgatgattcaaatccttctgaatatgataaagctgttgaaattgttaataaaattgaagaacttaaagctgaaattgaagaaaatgataaaagtaatacattcaatgcatttttagatatgaagttaagagaaaaattagaagttttagaagaaaaattagcatccttaaaatcaatcaaaacatctaatgaatatgaaaaagttaaccttgagttatctggtcctaattcaactccaccaaaaagtgaaccaacatcaagtagaccaacatcaaaggatttggaacatacatttccggccggtaaaagatatgttcgtagaagagtttttctttctaaagcttcagttccaggctctggtatatttgaaacaccacctattcaacttccaatgatggatttcaatgcaccatctgatgatcttatggacttttcaactgaaaatacaaatatggattttcaaagtcaacctactgttctgttacccaaatcattcccagttggtgaaactactaaaaatcctaagaaggtaaatagaggaaagaaaagagatagaccttataatcaattgatgaatattttaccaatggcgaaaggaaatggaaatcctttattactatctgctgaatctagtaaagctccagcatctgccaatttatcttcaacaacagcatctgaagttgtcaaatctgctaacacatctggatctatagcttctaatggcaaacaagccaacgcattccattcatcaaaatcaccaagtaccatcataacctcatttactattaaggggagacaatatcttgcattagttgattcatccgaggttaaaccacttcttactattattgactgtactgacagtataagcaaaaggcttttttcaaggtatgttagtaaattcaatatctccaatccattgatctcagaaaatatatcatcatcaccattatatcaactcagaccatcaagtaaagaaattcaagctgcttggaaatatttacaaacaagcaaaaaaacaaaagttaaatttagcaaagcttttgaaccattattccctcctgatagtagaccatgttgtgtttgtagagaaatgggtgatgtttcaagaatgattatatgttctaattgtggtttaaatgttcatgcctcatgctatggtgtggagcttccttcaaagatgaaaagaaatgcaggtgaatataattggcattgtgatccatgttcaaatgatttacatgttttggtatcaactcaatatgtctgtatgttatgtaattcaagagagtcaaatatggattcagcaatcaagggagatccaatttcaatacccgatgcattaaaaagaactgctgaaggtagatggtgtcatgtttcatgttcgttactgtgtgatcaaattaagtatggttcacaatctcttcaaccaatttatggagcttcagttacaggtcttaagaatgttctcgaattcatgtaaggtttgttgtaatatgggtggtgcaattgttaattgtgatttctgtgctactacaactcatgtaacttgtggtttagattttggatggcatattggattcaagttagttaatgtttttgatatagcccatggtgacgttgttgaaattgcaaaggataaagctgttggtaaattagtacctataatctcttgtgaaaaacctaacagtgaaacaaatggtagaccactatattatagtttttcagatataggtagaaaaataaatgttgaaaatggacaatcaagaactttgatcgagctttatgcatcagatgaaagaaaattagtcgatgataggtgccaacggtcttacacgtagaaaatactttgataagctattaaatgagtttgatgatttggtatcaaaagctaaattgaaagttgcgaatggaaaagctcctgattctacatcattaggaaaatgttacttctgaggctagtgaaataggcatagtcaatgttgaaggagagactgaacagaccaccgaacaagaagttgaacaaggaaaaccagaacatgtttgtgctcgttgtttcaatacttcaagcttaatatggtatacaaaggtaaattcctgaagatggtagtactgatgaagagtgtcatttatgtcataataaacataattacaatgaagataactctaagactacaattccacaattaagggaaattaataattatgttttcgactactagtatataagctctttatgatacatttgaaatgatacttttatatttaatattatacaatctatgtaatagtccaggttataaataaccacgggttagtatgtcctcgattctttgtatttcctctaatgaatcagcatcctcaagttgttttgctaactcttcacgatcttcatcagataaggattttttactaagtgtactagtctcagtgtgaagacagcgttatagttattgtttttatgaatggattgattagaacccaatgaataatattgtgtcgaccttatgaggatcatcagtgaaaaagttctttagcttgttgtcgttctgaatctttcactctttcaaaatctaaaacttgcaaacttgggaatctccatatgcaccataatctataatcactgttcttcactattggattgcctgttaagtataatgcacgtaatgaaggtagctctttcaaattttcaagatcggaaatgtataaaatatcgttgaatgttaatgacaaacactcaagattcacaagttttgataatcccgatatgtatcgtatatgattgttagataataaaagggtgtctacttttagtaatgaagggaaatctgttaagtaaacaaggtcatttttactcaaatcaattgtagaaaatatatctgttgattcaagagtcttaattgcatctagggaactaagatgaagatttcgtaaggacaaagatcgagttcctaatggagatataaaattcggagcttctatcagtattccctctgtcaatttcataatatgtaattggtaaataaattattcattcaaaagaattcattcacagcaaaattaagaaaatggtgataattaaaaaaagagtgaaaattcatgttgcttatgtaatgccttagccttagaacttcgaaagataatagaacttacgactagtagtaagtacaaataggagaagctcattcttgactatatacacaataataatttaaaaaggaataaaactaatatgacaaattctagttaacaggagaacatatctggaaaaatcattcttcaagtgacaattgtgacttatgtgaaggtaaaattttaccattttctggttcatatttcatcttagtcatttttaataattgttgtttatcttcttcagatagtaaatcaacagtttcatttggaccaacaaattgaaaatcaccaaaaccaaatgcacggtcacttatattatcaagaacgtagagttgcattctgatatatctgacaattgcttcaagtttaacaatatcaatatttttatcaccattaaatatatttctccaaactgcagcagctaaaacatcatcattcttttgagctaatgcttcatcaagggaaaaaatcataccaagcatttgtgagtggaaatctttcatataagtatctctaattctaccacttaaaacattcatttcttcacttaatcttaattcaatatctttgaaacatcttatcaactaatttttgttggtaatttttaccaattttgaaaggcattgctctcatacgtacaaataataaccaaacatgtaaatttgtgaatttgaaaccacattgcaaatgttctaggtaatcctaatgtttcataccagaatttagctgtttcacttaattcttcatctgtaaattgtaaaccttgatctttacacatataatagtatttagaacctgaaatggtacctgcacgaacattatccatatcaatgtgaaataatgaaacaaaagtttcaccaaatgctctcttccaagcaggaactttaaaaccttccttttcatatgctggtttctctaatttagccttagcacttatatctctatttggtaaatcaggattatctattttaggaaaatgagattccttaactaattcaacaggtgatggagctttggtttgggtattatcaacattggatggattagaactagtaaatctctttgcaagaaaaacagtgttgtttcttatttgcctctttccaacagcagagagcatcttgtttattagttgtcaaaagagaaagaatcaagatagagacagattgcaacaaatcagatttctttcatttcaaaatgtcatgaaaaatttcaaaatctcattattatagaagcacctagtaaaatatttctaagcattgtttctctcaatattatacgtcttctttacataaaaaagtgatactgctcctcgtgtcaccacgacattgtgtgatattaattacagtgttaatattgtacaattttatatataaaagttttattctatatccaataaaaaagagggtactttttcaaaaaccatctttaattttacctacgaccacgtcctttacctttagttgttgtctttgagcgtgttttacgtcctttgttggttttcacagcaacaactttcggaccttcataatgcgtatatccttgcttctcaatagcagaactattgacccataattgcatgtttctgatacgatcttgttgttccaaatgattgtagacacgacgtgctctatcaagtaatttagcacataaatcagtaggactttcaggacttggtaattcccttaaacgtaccatcttaataacttcttcctcatctttatcataatcaatatatccatctctgtcaacttcttcagtatcaacatccatcaaactttcatcatttggattgacttcaatactatcataagtactggttctttgtctttttctagttcttgtgtaagaatcttcactatctaaagaacgagtagcacgtctattagatcttgtttcacggatagtttcttcctcatcatcagcttcttcaattgcttcatcctttgtctcttcatttattttcacatcttcctcattatctaaagcttcttccttatgttcttctttgaccttggtttcctctttattcaccacttcttctccaaactgtttattttcaagcttctttatataatcaatcaagctcctctttctttcatcaccagcaagaaatttcaatctagccttaaaactattaatgatacgatttttacaatcttttaattctttcttcaatgctctttctctggtacctttatcctctaaccaaacaattaaatcttcaaaatcttttacttcatcaatataagcccaatcattttccttcttaagcaccattttcaccttcctcggctacttttcttttcaaaccatcttcatcatttttcaataaatgacgttgatcgagtacacttggaccttgaacccaaattctacccattaaataagtttcagaatcatattctccatcactttcttcttcttcatgataatcttcatcttggccatttctccgccattttctccgccattttctccacgtaaaccagaattatcatcaccatcttcttcatcttcttcgtcccctttattaccacctaaattaggtaatccatttctttcaaaccaccaatatctattccagaatctatctctacctaaatatctaattctttgagtatttaattcaactaaagttttatcaatttcaattctttgtttcttcaaatcatcaacctccttgattctatcagatcttgtgttaagtaatttcaaaaagtcgagattgcttgccgcaattgctttttctaatgaacttggctcggttggtaaaaagttttgagttggcctgccgcctttatttttagattcataatatttttctttctcttcctcggttttcaataatgataactccatctcttcaactctttgtttaatatctttgatatcaattgttctttgaaactctaaaacttccttattagcagcatgagcactttcaattttaagtttgatctctttttgaatttccaatttttcacgacgtaaagatgcagatttatcaacaacatgatcaatgtgttgtctgattacattaccatttaataataaattcattaaaattgataaaattgaaattctttgatcaacactactttttcataaaagtttattttcagtttctctggagttaggtgtatcatcatctaatggtgctaataattcgtaaactttaacaatatcaggtttaaattccttgatatattcagtagtagagaaaacaccaaacaaaactatcaaccaactaccattcttaaaatctctcttttgtaatctttcacgccatggaactttcttgtaattgagaatagaatatgcattatgattgatgtcttcttgttcatcatcgtcgtcactatcttcgtcatcaccttcatcctcatcttcaccatcttccccatcatcatcatcctcttcttcttcttcttcttcagcttgaccttcatcttttatctcaactgaatttttagtttctaacaatttcttttgtttctcctcttgtttcttcttttccttttcttttaataatgctttccttttaattgctctttctttcattttaatatctctttcaatatccaatggtaaattcaccaacatttcacctttctcattcataatacatgataacattgaacaaaagatttcaatgagtaatggacattcctcagttgaatttttccattgaatagcattaaggaaatcatcaaatgtaaatgtatcaataactaaagcttcatgaaacatattaataaacatccaaacttcaagcacattggatagagtaattttcttatttgattcaatatcaagaggtaatttttcaaatcctgaaagttgtttccatttaggtctttcaatatcatctttgaaaggtaataataaatcttcaaggataattattttatgtgattttttctcagcttcttcatcctttgtttcagtagttttatctacatctttgttatcatcgtcattaagtatatctgatattttattctttttggattttttaccatctgtacttttatcattcgaactatctgtcaaattctttttaccctttcctctagtttttggctttgctttggaatttttactattatcctctggtgcaggtgcaatattaacaaatccatcagcggatgcttgattttcaacgtcactattgttttctgttatttcttccactttcgatttcccctttcctctactcttaccctttttaacaccattattttcatcatttccagcagatgtttcatcgattgtttgttgcttttctaattgataaatttttctatttgaaatttttatacttttgaaaaatctttgacatttttcataatgccaaactttaatccttttaatatgaacataatggaatggatcagtatcaggatattcattctttgaaaaaaattgacgttgagttatgatgaaatgagtattatttggatcaaatgtatcagttactgtaataccacaaaatttaaataatttaataactttatcccttgatttatcttcagttaccatatcttcaaaatatgctgttgtacgtttaagtattttataccaagattcacaccatttaatgttcatatcttcttgagttggtggagtttcctttaaattttcaaaaattgtatgtgaaaaacctcttgttgatttcatacctttctctgtacgtggtttacgaccgttggatgttgaatcatcatcttttaagttattattattataattatcatcatcattatgggcatcgactgttaaatcattatcaatttctgtatcagtatcattttcatctatactattattatccatactaacatcatcatcatcattatctgcatcattatcaatattttctaaactatccatattttcatcttcatcatcatcatcatttaaaatattaacttttctcttcttttgattttttgaattaatgtaatcaaattttttcaaatgacttggccattctaatgagattttatatttttgagcaatatcatcacgtataacccaaggtgcacctaatctatttgatctaactaaactaattttaaggaatgttttaacataagatttagtaaatctatttctttcacgataaattgtgcttgcatcctctatatcaatttcattaccatcatctggtaaataaactctataagaaatgaatggagattttaaaaccccatttgaatcaattcttgaattgaagacaactttttcttttataattccatgagctcgataaccatttggatatttaacgataactttatcaccggggaaataatcatctttaaattttgtataaacttgatcaactaataaatcaattctaggtacaattgagaatgaaacatgtcttaaaattggttctttaactggttcagggaaattagcttgcattgataataattcattatgttcaacttttaaagcttcaaagaatgtaaaattagaattaccacttgtctcacaaacaaactttttaacattataaaatgatattctattaagataatcttcataattgaggaaccattcaccagtttcaggaattatccaaacaggagtagaaggatttgcatctgctggtaataaaggtggttcaataagtgtaattggtttacgtttgaataaaacctagagtaattaaaggaaaaaaaaatttaatgttagtattttgatcattattattattgataaagcaaaattacgtgtaacgcaacggtttaaatcagtgaaatttcggaataaattgattgaaaacgtaccattatctgactatgaagtgtattagataattgattaacaaatgaaaatgagaaaagaaataattgccacttgtttataaaagaaatgaagataaacaaactcccagagaaaaaatggaaaaagcaaattaaaagttgggaaaccaaaacgtaacaaaataaaaaaacatttcgtattttattaatctgagattacattataaactttatttttactgaaaatgtatttatatttcactatgtacaggtatatattattataaactacattattttatttatataaccaaccgaatgaaccattcttcttacgttctctaacttccttcggttcataagctgcaatatccttagcaattttttcaactgcaccttcagcttcataattacgtccaaggacatcaataaattcaccttcaggatccataagataaaagaaaattgaatgatcaactaaatagtcttgtccaggttttaaatctcttggtgtactaaaataaactctataatttctacaacatttcttaatttcatcataatcacctgttaatccaataatatcaggatgaaattcacttaaataatctttaataacttcaggtgtatcccttgctggatcacatgtaatgaaaattggttgtaattcaatattttgtttctttaaattatctaacattaaacctaatttatctaattcatcaggacaaatatcaggacaatgagtaaatccaaaataaataatactaaatttaccaattaaatctttttcagtaaaaggtttaccatcatgtgtaattaaattaaatggacctccaattaatggtttaccaatacctctatttgcttctgcttctttacgtaattttaatttctccttttcattacggaataaatatgttaatccaccaccaactactaagaataaaacaaatgattgccatgaaagaaattcaactggtttcttcttcatagtttgtgatgaataaccttcctctccaatcggtatacttgataatggtcttcttgaatattttttagttgttgtttgttgttgttgttgttgtgatacgggatttgaattaatttcagtagttgattttgcattttctggtttagtttcctttggattcacattaaggaaaaatctagttgaagagaaagctctttttgagatgatagatctagctaacatgatgtgatgtgtagtgaatcaatggctcttgtaatatgaaaaagacatgcatatattattaatgacttatattaaccctctattattaacatgcgcaaatttaaatttttcactttattacttagttaagttaagttaagctaaattggattaatttaaattaaattaagttaagttaatattactttatataaaagatacactatttagaaatcactagaaactaatttttacctgcaccagctctgaaataaataacatcaccatcttcaactgtataatctttacccttttgtaataatttaccagcagctttacatgcagcttctgaaccacattcaactaaatcatcaaattttaaaacatttgctaaaataaaagttttcattaaatcagtatgaataacacctgcagcttgtggtgctttagtaccttctctaattgtccattctctaacttcagttttttcacctgctgtaaaatatgaaattaattgtaatttctttctcattaaagtaattaattttggtaaaactgatggagcaccaattttcttttcttcttcagctctttcttcatcagtttccatttgtgataatctttcttcatatgaaacagataatggaataattgcatcacctggtgaataagtatcaacccattccttaattttaactaaccatttattcttcttacgtataaaatctttttcagataaattaattaaataaattgaaggttttgcagttaaaaggaacattgaattaataatttcaacttcctttgcagtccaattttgatttgcaactctttgaccagattttaataattcaataattttttcaactaaaattgcttcttctttcttttgtttaacttctaaactttgaccacctcttttagtaattttttcaattgcttctaaatgtttttcagcaaattcaatatcttttaatcttaattcttcactaataatttctaaatctctaacagggttaacatcaccttcaatatgaataatttctgcatcatcgaaacatctaacaacttgataaattgcatcaactgatctaatattagctaaaaattcattacctaaaccttcaccctttgatgcacctcttgtaagacctgcaatatcataaattgtaatataagctggaactctctttggtctaccatacatatccattaaagtatctaatcttggtgatggaacaataactcttgcttcttctggttcaattgttgcaaaagggtaattagctggattacctaatggacatctagtaattgcttggaaaaaagttgatttaccaacatttgcaagaccgacaataccagattttaaattattaccaggacgacctaaaaggattttcttttcttcaacttgtttctttggaggcatgttgtgtgtttgattagtttaaagtaagttcttaataaattcatccaagcagaaaaggaagtgtaatgccatgttgaaaaaatttgaaaaaaatgtcgacgaaagttattattatagtaaagtgagtgaaaaattaaattttgtttctcaatggggtaacttagccgagagtatgttatatttatttattggaatagcttattataattaaaagattagaaagattaaaaagattagaaaaataaacgtataaatgtataaatgtaatagaagtatagaagtataaaaagttattcatattttgtattgtatgttttttaattgaacgaaattgaagtgtaaaataaaagttatttttctttttttattaaatttaattagtatattattaagctttttccataactggcataaattcttcttcaacttcaaaacctttatttgaagtaactgatgttaattcattagcaaattttggatcactaaataataaatcaaaatcttcaacttcttgccattcttcaaaaaatttacgttcaaaaattttcgtattctctggcatacctccaattggtgaaattaatgtacaaattaataaaactgatgaacttgctgcataacctgtaaaaaatgaaaaataataaacataagttgcaccaattggaacaacatgagttttagttgcaccaacgaaaccaacaatatttggtaaaatacctgaaatatatgcaacataagctctccaattaataccaagtgaataataatatggtgatttctttgatgcaatatataaattttgtaattcaatataacctttctttaaaatataataatcacaaaaaacgacacctgcaattgatgaaaggaaaactgaataagcacttaaataagttgtaaacattgaagatgatgacattaaattccaaggacaaattgcaaatccaattgctgcacaaataaatccacctcttctaatattaatatattttggtaataaagcagtcatatcagtaccagctgaaagtgaatttgctgaaatattagtacctaattgagcaattgcaaaacctaatgaaataaggaaaacaccaccacgatcacctcttgaaaatccatctaaaaatctatttaaaacatccagtggattccaataagtttcaccatacataacagttgaagcacttgaaactaaaataccaataagacaagtaattgaaaaacaaattggtaatgaaataaattgtgataaaattgctgcacctggtttatttgcaaatcttgcaaaatctggagcattaacaattaaagttgcaaaattagcaagtgaattcataactgaattaacgaaagcccaaccaaattcagaaccatgaattgttgaaccttgatgaataactggtccaccaccatcagctttaactaaagtccaaatcaaaaatgcaatacctgcaattggacaaacaactgctttaacagtaaataaatgtctaacaatatgaggtggtaaataaatgaaaggtaattgacaaaaccaaaaaatgaaaaatgataataatttaaaagaagttgtattaccaccaattttatcaggtattctggttgttaaatctgtaccgaaaatagccattaacattaattcaacacaattaccaccaatagttgattgaacaccaaaccaaatacaagccataacaactctattaataacaggccaaagagaaccccaaataccaaatgatgatctacaagagacagggaatgaaatatgataagcattaccaactctagcagaagcagtaacaaaacaaccacaaaggaaataaccaatccaaacagttatccaagttacccaccaagataaaccagcttgaacacctgtagcagcaatttgccaagtattaacattaaaagaatcagcaatccaaaagaaaacataatgataccaatgccatttacgtcttacctcttcaacaggttttaaatcataattcattaaaaataactgttgtaatgaaaaaccttcagtaccatcaatttctaaccatttgaaaaattttagtaatggattatttgattttattttaccattattaaaatcgttatcatttgaattaactgaaatttcagttgttgaaccaacttctggagttgcagatgaatcatctctaattttaaataaggttttaccatcctttgcagatgtttcaaaagaactcattattgctattttctggtagctgaagagaaatataaaaaataattaagaaatgaaatgaagtgaaaataaaagaaattaaatacactttaaaacagaaagaagggatagatgattagttaaatactaaaatacccaaatgtaaagcatcaaagacagggtgaaagattgccgtatataaaaaaaatatcaaacggtttgtgataagaaagagaaaaaagagaaaaaagagaaaaaataccatgtcaaaattggaagatggtaaaaaaaaaatttcttttctttttaatataataggataatttaatttaataataccacatctcttatcaaattattatttttatcttgattttatcttgatttctatctttaccttggtattataccacattgtttatctattgtactattatctaaatatattctcttcttttttacggtatgtttaaccgcaattagtatatcaaattatcatgtaagccattgtaatattaaaatatcaccacaactcttatcaatgttatgatataatccctacttataatattatattctattcttagaggcatgtagtatataagcattttttccctcaatttacagttattattttaatttttatcatttactttatatggcgtgttttctttatcatatatatatatatatatatgcccccactccccttgttaaagcggacacgaaatgaataaccaataatttggctgataatctagataatgttattattatgggtatatctcctaatacgtaacatgacataataaattaagcaataataatatcattattattaggataagaatatattatgagaatataagtatacttattactatttgtttatcattgatttgatatataaactataagaacctaataagccctgaaagaagaaaactaaaaagtaccttaacttagcctctcatttataatataatatatgagaaaacgattgagtcatagttagaaaaaattttctttttctctttttcttatagtgaggagatccacatgctgtattaaacttaagtttcgattattatgacacatttttcactttgtaggatcaacaatttcttttgtagaatttatatagattaacttctttaaacaaataaataccactatagacaaaatgtcccgttcagactctgctgctccatctcaagatgaatacgatgatttacgtatcttagcaaatgaaccacttatctctcctgaattacttataaaggaaattcctgcaacaaaagattctcttaaaactgttataaaaggtcgtaaagatgcaactgcaattgttaaacaacaagatgatcgtttattagttgttgttggtccttgttctttacatagtaaagatttagcattagaatatgctaatttattaaaacctttagctgatgaattatcaaatgatttagtagtggttatgagagcttatttagaaaaaccaagaacaactgttggttggaaaggtttaattaatgatcctgatttaaatgattcttttaatattaataaaggtttacgtttagctagacaaattttcgttgatttaactgatttaggtttaccaattggttctgaaatgttagatacaacttctcctcaatatttatctgattgtttatcatttggtgcaatcggtgctagaacaactgaatctcaattacatagagaattagcctctggtttatcattcccaattggttttaaaaatggtactgatggttcattaaatgttgcaattgatgcaattcaagctgctaataattctcatcattttatgggtgttactaaatctggtttagctgcaattattacaactaaaggtaatgattcttgtttcgtaattttacgtggtggtaaaaaaggtactaattatgatgaaaaatctgttcaagaagcaaaggctgctttacctgaaggtaaaacaattatgattgattgttctcatggtaattcaaataaagattataaaaatcaacctaaagtttgtactgaagttgcaagacaagtttcaaatggtgaaaattcaattattggtgttatgattgaatcaaatattaatgaaggtaatcaaaagattccaaaagatttaactcaacttaaacatggtgtctctgttactgatgcttgtgttaacattaaagatactgaaataatgcttagagaattagctgatgctgtaagagcaagaagagctcttaataaataattattgtaattattgtatattcaatattattcttgttacatttacatttttataatacaattacataaagtctgaaattcatttatatataaattcctccctatcgatatagtaatatgactaattaatttcctccttctctctaagtaaaaaattttttttcactcttacttcctatttaggtagtggtgataaatctaaattttcaaatttcatcggttccaccaaaattattatgactctttctttgaatcatatcttctataatcaacaaatcgaccatgcctgtagttcatgtcatagatgttaagtcaggtaacttacagtcacttgccaatgcaattatttcactaggatttgaagttaaatttattactcatggttcagatccaattctagaaacttgtgaaagattaattttaccaggtgttggtaattttggtcattttgttaaagaattacattcaagaaatttcgttgaacctttgaaaaaatttattcaatctggtcgtccaataatgggtatttgtgttggtttacaaacattatttgaatcaagtgaagaaagtgaaggtaccgttggtttatcaattatacctggtaaattatcaaaatttaatccatctaagaaaagtgttcctcaaataggttggaattcagtcactctaacaaatggaaatgatgaagaactttatggaatttctccattttctaaatattatttcgttcattcatatgctgcaatacgttcaaatgatgaaattaataaattaaaggaaattggttggaatttagcattatgtacctaccttgatgaaacttttattgcagctgtttcaaaggataatattttcgcaactcaatttcatcctgaaaaatcaggtaaagcaggtcttaaagttattaaatcatttttgaatgatattaaatcatcaccaattaataatgaattgaaattaaattccattaaaaataatattgaaaaaacagaaactggtttaactagaagaattgttgcttgtttagatgtaaggacaaatgattcaggtgatttagttgttacaaagggtgatcaatatgatgttagagaaaaggatgatgatggtaataataatgttagaaatttaggtaaacctgtagaaatggcagaaaaatattatttacaaggtgcagatgaagttacatttttaaatattacatcatttagaaactctccaattaaagatttaccaatgttagaagttttaagattaagtgcaaaaacttgttttgtaccactaactgttggtggtggtattagagatgtaactgatcctgatggaactaaacattcagcattagaagttgcttcaatgtattttaatgcaggtgctgataaagtttcaattggttcagatgcagttcgtgcagccgaagattattatttaaataataataaaggttcaggtaattcaccaattgaaactatttccaaaagttatggtgttcaagcagttgttatttcaattgatcctaaaagattttatattgaagatccaaataaatgtaaatttaaaacaattaaaacaaattttaaaggtccaaatggtgaagaatattgttattataaagtaacttctcaaggtggtagaatggttcatgaattaggtgcagttgaattagcaattgcttgtgaaaacttaggtgcaggtgaaattttacttaattgtattgataaagatggttcaaattcaggttttgattttgaattaattaatatggttaaatcaaatgtttcaattcctgttattgcatcatcaggtgcaggtaatcctcaacattttgttgatgttttccaaaatactaaaactgatgctgctttaggtgctggtatgttccatagaggtgaatataaagttagtgatgttaaaaattttatgactaaaaatggtttattagttagagttgataatattgaattgtaagtaatattaaataataaattttataataataatacagtaagtatattttaaaaagcgttaatatatatattgaatgattttacagcaattatgagttttgttaattattgttattttataccctttcatatcaattctataatttttaaactaacttcgtcattctctgaaatcactgttttttactttttaggtggctcgtcatttttttcaatactttgtttttcttatttcttcaatattaactattttaacatcctttgaactattacaatataatgaataaagagttattatacactactgtaactttaaacgacacttaatagggatataaaccttatttataataatatcttttaaaaaccacttcatacacgacatgaaaaatgttgtaatatctccctcacacatagtaaaaatctatttctaaaaaattaattttaatacagtagaaattatacaagttttgatacaaattttaaatttaaatataagaagtgatttaatgttcttcttcaaactcttcaataaagtctaatcttttctcaatcttttcttcatcttcaattttgatacctgcacttacactaaattgtccaccacaaccaattatctcaatatcatgttccttagttgcagtattatcaattcttgtaggtttttcaacatcatcatctaaattacctaaaccaactgcataggtatctgcaaaaccccatgaataaacaaatccatctttggtaattgctaaagaatgatgagaaccacatgtaactgttttaattggaggtaatgtagtaattttagttggttttggtaaacaacgtacattaccattatcatcagtaatacaatcatcaattggcaatttatccttttcaataccaatttctttcatatcatatctaccaaaggtataaacttcaccatctgctgatacagctaatgaatgatgttcaccacctgtaatataaacaatatttttacctgttaattctttaatttcagttggttttgtaacaactgcaccatcatcaatattcatatcaataccacattgaccatattgattaagaccccatgataaaactttaccatcttttgtaattgcaaaactatggaattcaccagatccaataaatttaatatttttcaaactaaatgatcttggttctaatgatgacattaatgatctttctaaaattttacgtccaagttgatattgttgaccattaccccatgcataaacccatcctttagaatctaatgctaaaatatgatccttacctgcaacaattgatataatatcttctaaaacatcaattttaacaggagttctttgaatttttacagatttggaaaatcctaaaataccttcattatttctaaatgtaccccatgcccaaacatgtccgttttctaataatacaacagataaattatcacttgcagctaatttaacaattttgacatcttttggtaatccttcaactttaccaggtgttgattcaaattcatttaaatcaccatcttcatcatcatcatcatctgcatccatatcttttaaacctttatcaccagtttgagtagtttccctacctaagacagcagaatcattagtaccccatgaccaaacattattatctttatctaatgctaaaacatgcataccaccaactgcaaaatcaacaattccaacatcttcctttcccaaaaatggatttaatcttggtcttttaacttccttagtcttagcatcaggtcctaaacctaattcacacattgaacctgaaccccaaacaaaaacatctaatggagttgtatttaattgaggcttttcattgattgatttataacgtgatgctctaattgattcaaagctatgatgttcacttggtttagatctcttggatggacctggtgtagtattaccttcagaaaccaagccatttgcttttctttttctaactaatttagccatttgtttgtctattcaatgtttacaatggttaaataaaatcagatcattcaaaagagtgaagattgaatcattaaatcagtaaaattatgaaaccagaaaaaatgctgccttcctatttgggaaagagcatgaaaaaaaattttttcttttaagggaatttgaaatttttctttaacaagttcattagactggttataaagtgtatttgaaaatttagttttaggttaagagataactatggctaaagtatcagttaaggacgttaaaaataagaataagagcgttccattatatagagatattgctgcatctggtggaaaattaaaggctccatcatctaaatataaagctattgtctatgaaaagcaacaaaatgaaaataatgatgatgatggtgatgatggtaaagatgaatttgatttagatgcagttgcatctcgtcgtgttttacaacttgcacgtgaacaacaacaagaaattgaggaagaagaaaattttaatgaagttgcaactaaaccaagatttgaattaattcatgcagaatctgataatgaagacaatgatgaagaaatcgaggaagattatgaagaagaagttattgaagttgatgaatctgatttaaacccttctgaagttgctatgtttgaaatgttcttcaaagctaaacaaggtaataatgtaccatttgaaccaattaatctagctgataaagttatggaaaaaatggaagaagcaagaagaaatgcagagtttgaagatgaagaaggtgaagaggaagatgacgaagaagaaggaaaaccaggaaatggtgtttatttaccaccaagagtgattgaagcatatcaaaaagttggtgaatcattaagagcatggaagcatggtaaattacctaaattatttaaagttttaccaagtattaaaaattgggaagatttattatatgttacagcaccagaaatgtggacacctaatgcagtctatgaaggaacacgactattcatatctaatttaacagctgcaaaggcagaaaagtttgttagattagttttatatccaagatttcgtcaagatattgaaataaatgaagatcataaattaaattatcatctttatcaagccattaaaaaatcattatataaacctgcagcatttttcaaaggatttttattcttattagttgaagatcaatgtacagttcatgaagcaatgattgcagcatcagttttgaagaaaacttctataccagtacaacatgcagcagttgcattatcatggttattagaacaagaattctcaccagctgcaactgtttttattagagttttaattgaaaaaaaatatgcattaccatatcaaacaattgatgatttagttttctattttatgaaatttagagttgtcacagataaaaaatttgaaattaataatgaatatgatggagatttcgatattgatattgatattacacaacagaggaaattacaacaagcacctccattacctttagtatggcataaagcatttttaggatttgctcaaagatataaaaatgatataacctgatgatcaacgtgatttccttatggaagttgttagacaacgtggacatcgtgatattggacctgaaattagaagagaattattagcaggtaaggctaaggaacttccacaagctaaggccaataaagttgatgaagatgatattatgtcatacttctaatttaatataatataatacaaacattctataaagttttatctttttgtaattttaacgaataaagtggaataaattaatttattaccattattatcatttaattttaagtatctataaccatgattcaaatcatcaattttaccacaccaattggcaactgttatagttgaattactagctttaacaatattatttactttatcaataactgtactattttcctttaaacatttaacaggtaattttaataaatgataaatcatgttcatttgtcttataattgagtctacatgcaactattccatcttggtgaaaatgcattaagtgggattctctgctaatcttgatttgaatttagcattccaattaggtgatgttgataaattatcagtatatttcattttaatactaccagttgaagtaactatagttttctcaatttcatcttcaatatcaacttcatcacatgtttcatcaacagtttcatgagttgtcttattactgaaatgtactatttctccattaactggtaaaacattaaaaatttcaatttcaacccatggagtatatgaatcattatttgatacatctttaggtttaggtaattgttgaccggatataatactaatgtcaaaatatttattaattgtatactctaatttatttaaattttcaatcttgatcaattctttactcaagctgctattttctgaaataaatagtgattcaggtttcaatctataaccattaaaattttgaaagaaagcttcatttagttgttgtccaatatcccaaatttgccagtttgtagctaccatttgacaacctaattgccagaaagttattggattaaaattatcagacttataatgcacaacagatggatatattctcatcatacctctcttattatgttttataatcgaatttttctttattttatcacgtagcagatttgataatgatctatcactgaatgagaaaaacatgattgtaagttttagattcaggtaaggaaaagtttctaaattttataccagttaaatatggacaggaggcagataattcaggtataattaaataatttgaacttgaaacaaattttttttgttgttttaaatactgactattatcatcagactgcgttgagaatgaagaatgggatgtcgatgtttgttcaagtataattgtttcctttgactttttcactttcagtaaaattttgtgttttaattcattaggtgatggtaatgttgaaacatcattaattggagtcgttattagtttatcactgaaaattgatttcattatattcaaacatttttgttgattttctggtgaacatttaatttccaatgatataattaagggaaatggagttataataaaagcatatttatgaattatatcaataactaactcgaaatcaattgatgtagtaaatgtatgaccatgggttacaattggacctgattcacctatcccatatatcaatttcaacacatctacaaccacgttgtaatgcattaatatacccttcaattgatgaattaccatgaaattgctttcctagtaaataagtattatgagatgaagatataaaataatcagtcaatggacgtgagtaataatcagatgattcacacaatgggatgtttaatgttggtggtgataaattactatgaaggaaattattcaaattattttgtgtcatataagagttatttgttgcaaatttattgaaaattgaaattggatcaattgaatcttcatgttgaacatttttcaaaaatgatgtaaattgttcaatattcatttgaccattaattatattatctaaatcaggtcgatttttcaattttaatacaaatttttgaaattgtgggaatgtcaaataacctgaattattgacatcacattcttcaaataaactatggagataagtattattgataaatatttgtaaatcattagtcaattgtaaaatatcattgaatgataaacgatctctattcttataaagagaatgattaagtaaagatttttcatttttcaataagttattaagtgtattgtaaactaaattaaaatttgactttgttatagttataatatgtaaaattttcaaatctgtatgtaatgaaggagattttgaaggttttgtataaattattgaaatccataaattttgatattgattagatatattaaattgttctctataatttttagcatcatcaccaatacgtatactttgaattctatcaattgaaagagaagaggaagtccatgataatgtattatttgaaattgtaaaccgtcgacgagtttgctttctacgagttattcttatcatatcaattcctggagatatgagtatctctggaatagttgagttaacatcgctcttttccaccgaattatcattgatgttatcatcaattttcaagttatccatcatcactgaaaggaagaacgtgtcattaattaaaattaaaaattaatttcaataaaatttgagccatattaatctaatgaaatttatctaacgtattaatatgcggctagtgtaggaatagttgttgtgttataagttatatatcgaggttatagatgttatgtatacggattataaatgattaattggattgtagacgaagtctctttggcgaccaatctgttaaggctttactacgtccataataatgtctttcataacctttcttttcattattatcatcgtaaaaatcaatttgagcagaatcataacctgtaaatgaaatttttggtaaaacagctaaatcatagacctgtacaggattagcaagcattgtaaatattttataagagaatttttgatctgcatcaacatttggaccaaatatttctctattaagttgaattgatgattggtcaagatttgaatttttcaatgatgtaaagaaaacaaattgatgtaatgtattcatatattcgaaagctgaatctgttaagattgatgagccagtaaattgtatacgtggagcacctgatgcatcaacatctgaaaattctttttcccaatctattgatttaattaaatcattttgtgaatatatgataaaagtaatacgtgcaataattctagctattaatggatgataagcctttgctctgaaaatacttggagtgaaagataatcttctagaatagtgatcagcccaatcaggagaattcagatcagcatctataccaagccaaactttagttggtaaagttgataatttataccaatgtttaattggtttaacatcagttgtatcgatatcagcatatacaccaccatgaaggaagacaagtaaaaattttaaaaattcatatttaagtctatcatgaggaagcattcttaaagcatcgacaacttcaggaacaagtggtctcattaaatcagctacaatatcttcagcatcctttaatgataaaagaatatgttcatgatcaggattagcagatgcccatctatcaattaattctttacaagcatttgggaattcttcttccttagcatcatcaccttcttttgaaattgaatcaacatttgaagttttccaaagttgtaaaatattattttcaactggatcatttggattataagggaaatgatataacattctatcgagaattgaagtcatttggaaagaatttcttgaaggtggagaagttaatactttaccattatgatcataaattgttaatggaatttcttgaattttattgtcagttttagatgattgtctcaaagcagctgcagtatcgaaagcatgttgaatatcaggagagtgaacagatgggtgtaagatattgacagaaatgatattcaagagagtgaacacgactatagtcgataccaatacataacgaagagtcattactgtcctgtaacttacttaaaaagagatacaatcaataaagctattaatatactacacaaccatcataacataacagaactgaaaaaaattggaattttccactttgatcgcgtttctctttctctttctctttctgtggatgattgctcagtcaatttgctgttgttattaccatgagttacttctttgttcttttgggattataccgacacagacaatggttgagataggtcctgtgcgtaggagaagatccattctatctggatgtgttgctatagccgttattgctactcttttctttataggatctcacgttttcactaaatcaaattttattgatatttctcaatttagtgctgttgataataataatatcaatgatgattcaaatgcggttgaagctgcaaagaaagctgatagtttaattcctcaaattaatcatatgcttaatgatcctgctcctcttcgtgatttatacctatctaataaacatcaaggttatgttaattatggttcaacaggtaatatgccagatgatggtataaattatttgaaagattcaaataaggatgataataagaataataaaaataatgataatcataataagaataataataatcaaaatgatgatagtaaagttgatagtgcagaatcagatgcaaatgatagatcaataccattatctgatgtttatatccctgatgaggaagctttctctaaaattaaaactgaagaatttattaaaggtgatataacattccaaaatttcttctctcatatacttaaattaatttctcataatcatttatcattcccacttaaacgtagaatgcaattagagaatggtaaaccagttattgataatgtcctattttatgaatatcctgaagatagattaagtgaacaagatttatatcaatttttcgatttcccacaaaattttattgatgatttaaaaattaaacatgaaaatgttgttcgtggtatacctgatatcgtacctcatttttataaaggtgatggttatgtcgttgttggtggtggtatatattcttggtatgctcttttaggtatagaaactttacgtaaagttggttcaactttaccagtcgaagttttcttacctgataaaaatgattatgaatatgaattttgtgataaaattctaccaaaattaaatgcaagatgtattgaaatgtcaactattttcaatgcagatagtttaaaaggttttgatgttcaaggttatcaatataaagcatttgccttattagcttcatcatttgaaaatgctttccttttagatagtgatagttatccagttcaaaatcctgatgttttatttgaatctgaattgtatgatgaatataaaatgattacttggcctgatttttggagaagaacaacttcaccaattttttatgaaattaggaaaactgaaattggtatggttccagttagacatttaaatgatttctttatctcacctgaatatttatcttataagcaaggtgatgatatttcaactgatgtaacttatcatgatagagcaggtacaattccagattttacaactgaatcaggtgagatgttaattaataaaagattacatttcaaaacacttattttagcactgtattataatcatgatggtccttatggttattatccacttttatcacaaggtggtgcaggtgaaggtgataaagaaacttttgttgcatctgctaattattatggctataaatattatcaagttactaaaaaacctgaaagattttatggttggtttaatgaagttcaaaattatgaacattcaacaattgttcaatataatccattaagtgattatgaattgttacaaaaaacaaaggaacaaatgagaaaagatattgaaactgaaaaggaaaattatgtttatgattataataaatatttttcccacgttttcacatctgcaactgttgatccaatgttttaccatgttcatgatccaaagatggatccatttaagattatggataaaaaatggacagaaaatcttgatggtaaaaaaattcgtaatatgggtgaagatttcccaagagttaattttgatcttgaactatttgtttggggtacaatcaatcattatatttgtgaactgagattagaattcagtgcatttgatggtaaaaactggggaatgttatgtaaagatttcatgccagaacaactgaaatacttacgtgaaagttcaaagaaaatttatgacgcgtacgatgcaaataacgttgttgaacaaattcaaggtggtcgtatctggaaataagtgtacacttcttcttcttcttcttggtatattatattctatattctttatatctacataagtatatctttgtaatggaaaaaaaatatttatatttaaaagactatgcaaaagaattaaaggctaatttgaaaattcataaaggatgaaactattataaaaggtagtgaaatcgaatcacaatttaaaacctattcaaaattacaacgattgtttaaagcatgttgataaaagagatgttaaagaatatgagaaacatatcgatagtttctataagaaaatagaggataagaggaaattagaggtgaaagatcatatagagaaagttatagtggaggaaaaaaaggttgatgaagttatactgagtagtgatcatcaagaggaagaaccaaaaaacgaagaaaaagaagaagaagaagacgaggaagaagaagtagacataacggaagttggaccgacaccacaattaaatggacgagtgctttctctatttgatattgttacatctcctgataaaactccaaagagacattttggtaagttcttcacgtaaattgtcattcagtgaaagtgaagctaatgatagtaatgaagttaatgaaataactattctcaataaaattaatgaaactccaagatacttacgtactcaagcagatagattaagaggagtcggagttgtaatggataatcgaataattgatgaaaccatagttgattcaaaatttgaggaaccaagtcctatattgaaaagacatggacgaagtatttttgatataagaaaggatctggttggattgaagagaaatttgactgatttaatggaagaagcacaggaagaggaagaaatgaagatagagaatggagatgaagtgaagaagcaaggggaagtggaaggaagtgaagatgatgtgggaggaatagaaaagaatgactggtgatgtaggagaagtatatgatccacatgctaaattacgtgctaagattaaaactaataaaagacaaacaagaagagctaaattgaaaactgataatatcaatgataatgatgaattggatagtatggacatccatgcattagcctttggtgatatcaaaagtactgaaaagaatgaaaatatgaaacgaataaatgatgatgatgatgacgatgaagaagaaggagattctgatgaatatgagagaagggatattgaagaattaaagattgaattgggtaatgcaacatctaagggtaaacatccactttcaaataattttgttagattaaagataaataaacgtggtaggtttaaacgtagacactaactttttataaagaaatattattatacaatacacattaattctaagcattaattaattctaacatacctattatacgttcagcatcttgagctttcttgatttcgatatcaatttttttctgtaaatttaaaattaattcaccaagtacaggttttcttgaaattaattcatcatacatttcaaggatactaataatataatcatttataatactaacatttctaacatctttaattgatttaacacaccaagttaataaaggttctaatgaagtttcatcacgatttgataatgcattatgaattttacctttctttttcaattcttctaaacatgtaactgtgaattctttctctaatccatcctctaatgcactattaagtgcatcagaccaacgaaatgcatttaaatttttttcaaatggttgtaattttttatatttaaccttttcatcaataacataatgttcaccttcacctttaaaatcagaacctttagtatttctatcgaatgcatgagatttattactatttttcttactattggtattattaattgcatttatatcaattttatcatcatttaaagaatttttctttgttctaattgttaataaaccagaatttaaaccaacaactaaatgtttgaaaatcaggagataccccacaacttaaaacacctgaaccaaatttccaaccgaatttaacatcccaattagttgtagcttgtatcgaaaactttaacatgaccatcaattgaaccagctaatatacctctttcacctgcactacttaaacaagtaacagttttattaaaactatgtaaagatcttgacattttaccagcaattaaatcccattgtttaataacaccttcaccagcggatacaatactagttgaattaattgaaagtaaatcttcaacaggtgaagattgattaaatttaataattggatcattattaccaattctagtatcaaatatacgtataaaattatcataacaaccagttgcaattaaatttggagaattttcctaaaaatgtacctgatctaatataatcatcatgattattaaaggaaattattggtttttgagattgtgaaatatcataaattctagcaactctatcatccgaacaagttaataagttagtattaatagttggatgaaatttagttatatgagttggatgagatgatggagtaattgtaactaataaagttcttggatgatgtgcatcgaaaatttgtacaagaccagaagcatcacctgcaactaataatttaccatcatgtctaaattcaccacaataaactgtatctttaaatctagtgaaattcttaacaactttcctcgtctttgaggagaatacttgaactctagttgaagaagtaattgcaaaatcatgtggtgaatttggatcaaaatttatatgtgtaattgcattatgttccttaactagttgagaattggtgaaacctttccaaaaacgttgttcaggagatatctgtgcagtgaactgttggtgtccttaccacctgtactctctctctattagcagacattgtatatgtggagtactttactatgtaatcttatcttctttataactgttaagtaaataaaattttttaaagatttacatagaggaagtgaaaaatttaaaaaaatattttttgctcggaaatttcgggggtttctgtggaaattcatgaaagtggcgatggtatgggaaaattccgagtatgtctgtctgtctatgtgtgtacctgcttcttcttggagtggtaggcacaggacaatgatgttgagaataggtagacacaggagggcatttaatttgataaatgtattcaataatggacgttattattctttgagtaaggatgatattaagaatcaaccatctctgaaccatttccaaaaagagattgaacaagctgagccaaaggatgtcaaggatgtcaaggatgtcaaggatgttaacgaggttaatgaagttaaagacattaaagacattgcaaagccaccaaccttttttcaatcaccaacccctccaactcctttcaaaccagttaatacaactccaccaattgtgccaccagttttacctgtgaaacaatcaaaatttatgtatattttttatgcattagcatttttatcaactgcttatattggtgttgacatattgaatgctttaataccttcaaatactgattatataagtgaagaaactttagaattattaggtaaagcaattgaaaatgaatcaaaaaacgatattaataaatcaattgaattttatctaaaagctttaaaacaattagatgatgaagaagttgagcatataactccatgttatacatcaatttgtattagaattgcacaattatttgaatatgagaaaaaattcgataaagctttaaatatctataaagaattaagtgaatgttatcttaatgcaattgttaatagagatgaattttcaacgttaaataaaaatgaagcattcgattttgcaattttaagaagtttaacaatttcaattaaatatgcaaatttattacctgaagaagatgtggaaattgcaaaggaaaatttattattcaatattgttgaagctcaaaaaagaattgttgaacattatccaccatttttatcaattttaaatgatattaataacagaaatattctatcattaattacatcagatatagaacaatcaattagtcatttatcgaatgaggaacaagagaaaattttaaaagaacaaactgaaaatccaattgttttacctttatatacaactgaacaaacacctgaaaataaattacttggattagatgttaaagcatggccagttttcactagagttttaataaatgcaaaggatatgtatgctaatttatgtattgaatcaaatgatttaagtaatgcaatttcaagtttaacaagtaattcagttataattcaaagatgttttgatcatccatcaagattaactttaacattaagtaaattaggtgttgttttacaaatgaattatgaaaatataagtaataatttcccaaagggtgaagatattgatatattattaaataatgaacatatgaaatctgatatttcatcaagtgaattaaagaaagttgtacttgcatcaacaacaactgaatcaaagagaattttccttaaagttttatcactatgtgatacaatgaaaaagcaagaacaagtaatgagaggtaataatcaattaggtaatttaggtgaatgggaagcaatgtttaaacctgcgttagataaatcagaaatggtttcaactgcttcattaggtatgattagttatcaagagggtaaattaaatgatgcattgaattattttaaaagggctaaaattttagcaaataaattaaaggataatgattatgttgatgatattaatggatggattgaaataattcaaaattaatgtttatcataacacacgatcaaataaaaacttgtttataatgacgattaataatatactagtagtattatatataatataaagcaatagaaaagaaattgtagtaaatgaatacgaatatgaatataaatatgaaatatttaactaattccagttatcagttaaagcactatcctccggatcataactaaataattcagagaaatacagcaataaaactgcaaatatattaatccaattccaaaattgccatgtatgaattggcattattgatgatgatgaattattatttgtttcatttgagaataattcaacaaatttattatgtaaccaaagataaagatgagtttccttatcaatttcataattatactgaatcattaaatttgtataaactgcaattataatacacggtgaataaagataaattaatctacttgaaggagattgttgaggtttttcattaatattatttttattaattgatgataaaattggtataattttagttgctgcaaagaatactaaaattctaaatgccaattgagttaaaattgagaatgttaaattattaatactaattttaaagaaatcccataatggatcaaatgaatttgggaaatgttcgaaaaggaaattaattaaatcttcacttatttgattaaatttattgaaaaataaaacaattttactattcttatttgaaattaatttatcaatccaactatcctttaaattttgaaaaaaataattaattttgtagtattctaaataatgatttaatttaataattattatattttcattattcaagtttaatccctttgcttgattatcaatttttttaaattcattgaaaacaaatttaaacagtgaacttatattatcatttgataattcaggaaacaattcataacaacatttgataatatatgcaaccattaatgaactttctaaagttgttgctctattaaaataaattgcataaaatgtaattaaaattgttaaagtgaaaaccgaacctaataatgaagcactaaccaaaccaacattttctaaatcaatcaacggtgatacataaattttaccaacaaaatagaaacttgttgacaaaatacatgaacttaaaataagatttaaaattgaccaagtatctgatttatttttaacaaaatattgaaataattgaccaattgcttgaattgatagcaatgaacaaaaaccttccagtattgtaaataatggagttgaatttattaagaaaatcttccaaaattgtataatataagtccaccaaatatttttcaaaaatgaatcattaataacaattttttcatcaccattattgaaaactgttaaaaaaaatgataataaagttggtaataataaatgttgcaaataatataggaaacttgaaataaatctattgtattttaacattctaaaagttgctaatccgaaatataatattaaaattgttaatgaataacttaatccacaattcaatcctccaacttcaaaactaagtggaattgttaaaataatatatatcaaataaacagtggcaaacagcacacgcacacatcgtatgaaagtatcgtccgttgaatgtatctgatacgttctcttcatctttgtctatcagatatcagatatcagataagataagataagataaatcctataatataaatcagtctacttaataacaacggtcaccatttcctcatagaaaaaaaatttttttttttcagtgttgtttcatgcatgttaaaaaatatttgttagtaaatacaggtgttttttagcttatttaatagacaaacacagggaagatgactcagaagccagtaaagaggaagtttggaagagaggagaagagagtggttaccagaacttctagaagaaaagatagatttgaagacaataatgaagaaatagatcaaagtgatgtaagtgaagatggcgatgaggaggaagaaggagatgaagatgaagaggaagttaaacgtacaattgcaattaagagaaataaaaaaggtgataataagatggcttattctgctttagttacattgttgaaatctgaacatgcattagatgaatttagggaagacgaagaggaagaagacttggaaaagaaacaagaaataaatgaatcagacaatgacgaggaggatgaagaggatgaagaaaatgaagaaaatgaagatgaggaagatgaagaggaagaggaaaatgaacaatctgaagatgaattagaagaagatgaattactgaacaaatatgatgcattcaatcttcatttcaacgatgaagaaaaaattgaaaaaattataaataaatttgattcattaccagcatcagagagaagacttgaacttgtcaacaaagaggaaattattgaaggagaagatgaagacgaagaagatgaagaaaagtttattaagtataaatatggatacccacaattagatattgattatagtgaaaaatcaggtaatgggattgaaagaaaattaaaatatcataatgttaagaagagagttcaagaaagattcacatcaattggagacattaagaaaattgatacatcattaattgaatcaatgttaacctatgaaagttttaatttccaatatagtaataatgaaagaattaaggaaaaatatcaagattattatttattacatataatgaatcatttattgaaaactagagatactattttaaataataatgctaaaaaggcattatatgagaaaaaattaaaggaaggtacagcaggtgatgaagatgaaccagaatttagagatcaagggtatactagaccaaaagttttaattttattaccaagtaaaaattttgcatataaagttgttaataagatgattaagaatttccaaatggaaaatgttgaaaataagaagaaatttaagacccaattttatgaagaatctaaaattaaagatcgtgtttataatattaaaccaaaggattttgaagaatattttgatggtaatactgatgatatgtttgttttaggtgcaaaatatacacgtaaaacattaaaattatattcaccattagaacagagtgatattatatttgcatcaccaattggattattaagattatatgataaaatcaatagtaaagatgaagaaaatgattccaagaagaaagatagaagagataaagagaagaagaaggaacatgaattaaagaataatttcttaagttcaattgaaatttgtattattgataaagctgaaggtattatgtttcaaaattgggataatataaatgaaattatgaagaaacatttaaatcaaataccgaaaaatttcatgaatattgatttttcaagaattagaatgtgggctattaatggacaaaatgaatatttaacacaaatcatgtgttttaataaatttaccacacctgaaatgatgagtattgttaaaagatcattaaatttaatcaatggatcaacatcatatttatcaattgataataaaagtgtaattgataaaagtaattataaattatttcaaatgggggttattaataaatttgagagattaaagcaaatgtttttaagatttgatattgatatgaaaagttatgttcaagaacctgagaagagacttgaatttttcaagaattcaattttaccacaaattttaaataagacaagttataaatatggtacattaatttatataccaagttattttgattatttaagggttaagaattttttacaaaatgatacaagtgtttcatttgttgcaattgatgaatattcaagtaatagtaaaattactagaaatagagcattatttaagaatcgatcgaatttagcaccaattatgttatatactgagagattacatttttataaaaggttagatattaaaggtgtacgaaatgttatattttatcaattaccatcagatggagatttttatgaacaagttttaggatttattggtaatgaaaaattaagagttacaagagacaaaatgaagattaaagttaagaatgatgatagtgatgaagaagaagatgatgatgaagaggaagatgttgatttaaatttatgtatggttagaagtatttattctaaacttgatgccatgaggtatgcaccaattgttggatctaataatgttggtgcattaactggtgaaagtgaaataactgaattttcataatcataggtaagtaatttaatatttatagatctgatatatagtatacaatttagaattagaattagaatttaaatatttatattcacttatctatccaataagttgctttgtagccataaatatacaacaaagagcaatatatggagacatacgttcaccaatacgagcacatttccagaaaagacctaaaagaccagttttatgtttgtctaaacctgaaggccatattgaatgaatatgagtacatgtacaaattagtaaaacaatcacctgtaaaagagaggtaaaattaaataatgcagactgttattattgttagtattatgatatatgagagtattctattgtattactatacataccattataggtggttgttgtagaaagaagtgttagttggtagagaaaggtgtcaaagtattaaagaacgcgattttattgcaacatgaatattttgagattttaccaactgcatgactttattttattaataagagtaatggaaatatttgaatttgaggagggtgatagtggtatacccgatattgaaacagatgaagcaatttatgataaatatgtaccaacagatacggagacagttgaagcatatcttaaaagtttagatgaagaaattgataatgaaggtgaaccaaatttaaagaatggtcatataattacatgtgttaatgataatagtaaaattagctttttacgtagtattaatgggattttcataccaccagagaattttgcaagagtttgtaaaggtatttatagatcatcattcccacgtattgataatttcccatttttaaaaaatttacaattaaaatcaattttatgtttaataccagaggaatatccaatagagaatgaaaaatttaataaaataaataatattaaagtttaccaaattggtttaagtggtaataaggaaccatttgttaaaattaaacctgaattaattacagatgcattaaaaatattattaaatcctgaaaatcaaccaattttaattcattgtaatagaggtaaacatagaactggatgtgttgttggatgtatacgtcgaatacaaaattggtcacaatcaatgatatttgatgaatatagaagatatgcatatcctaaagagaggccacttgatcaacaatttattgaaatgtatgatataaatgatataaggaattatgcaattgaaaataatttaagttttaaatggtaggtaaagtccattttatataaacgtttttttaatttataaaatattaaaatatttacaaccataaagtccagcattagttaatgctaaacctgtcattgtctttgggaaaattttcagattccataatgaatttctaaaagttgaaagtacataaagtaaactccaaacagttataacagcagaaccattttttggatcattatcataacacataaaaccacctaaaccaataaatccactaaatactgcaacttgtaaatttgaaggataagcggaaactaatctagcattttttttcaggaatgaactatttggagtatctactgatattggtatttttggagttcttaaaattggagttaaaagaagtgaagaagagaataaccaagcaggtaaaggagatttcccccattgatttaaaattgaaatttcattaattgattgtgaatttgttggtggtataggttgttgtgacattgtatagtgaaagagaggaaagagaaagaactatatgaagaaataaagaatctcatgaaagatattataacataaactacacgtcccgaaaataaaatttaaattttaatattttaatactaatatactaatatacacacacataaatataaatataataataattatactttataattaggatctttcacctcttaatcttcttgctaattgaatatctttcttttgaatagtaactctctttgcatgaattgcacataagttagtatcttcaaataatgaaactaaataagcttcaacagattcttgtaaagcaccaatagcggaagattgaaatcttaaatcagttttaaaatcttgagcaatttctctaactaatctttggaaaggtaattttctgattaataattcagtagatttttggaatcttctaatttctcttaaagcaacagtacctggcttatatctgtgaggtttcttaacaccaccagcagttggagctgattttcttgcagctttagaagctaattgttttcttggagctttaccaccagttgattttcttgcagtttgtttagttctagccattgttgtttggatgatagataaagagaaaaattaagactgattacatgccacaaaagaatgtagatcaatgtctctatttataaaaaagtgcgaaattgtcttattcttatcaaattatttcatttacacagtgtatatgtgtatatgtgtaaaattgatacccgaccctcagtatcaaatttactatctattataataactattataccggtctgagatttattagattaatacgcgaaaatattataccgctcatactaaatatacactatacactatacactatacacggtattactattactattactattactattattattactattgtaaaggagtgttatgtatggatatagtatgtctatatgatattagatattattgtataaatatcaccatatccccccaatttatatcttccatttcctctctcatttatttctttcttcttttagtatcaaacaacaaatacaaattaattaataatgtctggtagaggaaaaggtggaaaaggtttaggtaaaggtggtgcaaagagacacagaaaaattcttagagataatattcaaggtattacaaaacctgcaattagaagattagctagaagaggtggtgttaaaagaatttctgcacttatttatgaagaagttagagctgtccttaaaactttccttgaaaatgttattagagatgcagttacttatactgaacatgcaaagagaaaaactgttacttcattagatgtcgtttatgcattaaagagacaaggtagaactttatatggttttggtggttaaatttaatctaattttaactattagttatttttatttatcttatttaagtctcagttattaggtattaattacctttataatgtgtatattagcaataaatttttattatatcgaaattatttttgtcttttatgattattatgcttaattatagtcatatgctcatataattatatgcttatatagtcatatagccatatagtcatacgcttatatagtcatacaatcaatccctcttatcaatttgcaatcaatacaattttttttttataaaatttctatttactaatttaaaaaaatactaaattaaaatttaagcacctaattcattagttaatctctttgaaactgcatcaataaattcaccagttgtaacatatgatgatctatcagtttcacctctagctaatgctaaatcttttgtcataataccatcaattttaacagtttcaattgttgccttttctaaaatttcagcaaatttaacaacttgaggagtttcatctaattcacctctcttaattaaacctcttgaccatgcaaaaattgatgcaattgaatttgttgaagtttctttaccttgttgatgttgtctataatgtcttgtaactgtaccatgagcagcttctgcttcaaatgatttaccatcagctgaaactaaaactgatgtcattaaacctaatgaaccaaaaccttgtgcaacaatatctgattcaacatcaccatcataatttttcattgcaataatataaccacccttagatttaaccatttgagcaaccatatcatcaattaatctatgttcataccaaatatttaattcttcaaatttagttttataactttcattataaattctttcaaatgtatccttaaataaaccatcatattgttttaaaattgtatttttagttgacatatataatggtaattttcttgaaactgctaattcaaatgatgctttagcaaaaccaataattgattcttcagtattatacatacctaatgcacaacctttaccattaaaattataaacaggaacttcaattggttttgaaccatcctttggagtgaaaactaattttaattcaccaccacattcaggtgtaacaatattttgacatttatattgatcaccgaaagcatgtctaccaataacaattggtttttcccaatgttcaacaattcttggaatattttcaattataattggttctctgaaaactgtaccacctaaaatatttctaattgtaccatttggtgataaccacatttttttaagaccaaattcttcaactcttgcctcatcaggagtaattgttgcacatttaattgcaacaccatattttttagttgcttcagctgaatcaattgtaacttgatcattagtttcatctctatattcaatacctaaatcataatattttaaatcaatatctaaaaatggtaaaattaatttatctttaatcattttccaaataattctagtcatttcatcaccatccatttcgacaactggtgtcttaacattaattttttcaaatgccatttttgttaattgatttgtttactaaaagagagaaaagaaagaagaaaagaaaagaaggaattctaaaagaatgaaaaatagataaaatcaataaagggatcattgaagaaaattggaaaatatggagaaccccccaagtttttataaaaagatgaaaaatgggtaactaagattataatttcaatcaaatgattggattataggacagattccgttatcgggatttcaatagattccctattagctaataagcgctctttctctttctcttttctctatgtttattatcatcggactataggggtccgatagtataattatggtcacgtgttattgcgtaatatagtcacgtgacattttaaaatttaaacagacgcgactattacataaattaatttttttgtaaaaataatacctacttataacaacaataataaataatagcgtaaacttcgtaaaaaataattatcaattactcggatttaagattacccgattaatcttagatactgtatcactactaatcttttttccatttttcatttttcattttccattaattaggttttaggttttaggttttaggttttataaccatgaaataatgagctcacaattataattgataatattttacttcataataatacttttattacgtagttttatgatgacaatttaaaataatcgtgcaattcatttattataatctactaataaatcttccttttggaaattaaagttgatagtatagtatagaaaatttacataatttatatttataatacaattaggaattataaaaaaccgataattaaacgtaattcacttcacattcctaatacaccctctctaaaagtacactctacatataacatttcttgctatttattaaattttttactctttgccctaccagttaaccttctccatcgaaattgacatccattagttgtcctacctgggaaataattggatatttgaacccaattcatcttttcaatatcttttaatcttaataataatctatcttcttgtttactccatgattttgaacctcttttagtatcccaattaatttcatttaattgaacattggctgtattcttaaaattcatattcatatccatattctcattattattattattattgatactattattattattattattgatactattattattattattattgatactattattattattattattgatactattattattattattattgatactattattattattattattattattattactagtattatcattgatatcctttttaatcattggattaactaaatcaattatctcaattggtgctccctcatacactggtgaataataagtattgttcttgttagtaccattactattattattattattattattattttgtacattattattcctattagttgtagtatagtattgtggtattggtggtaaatattcattatttattggtggataatatatcattggatatggctgaaccattgtaccattgctattattattaccattattactatcattactattattatttgtattattggtagcatttgtatatgatggaatataatattgtggtgatggtataaattgaatattaggttgtggaggtggaggtaatggtaataatgattgttgaagattttgttttgattgataatttattggtgacgaagaatttgatatttgtgttgttgttgctgttggtaattgtggtaatgatagtgatggtggtggtggtggtggtaatggtaaatttggtgattgtattattggagaattagatgctatgttatttaaatttaaattataattataatgatttggaactggttgataaatatcattttgtaatttaattgatggtaatggaattaaatgtgatatcggagttgttaatggtacaagttgtggatgcattgaatttgaataattattattaatatttggttgaattatattcatattaggattagtagtattaggatttaaattaggacttggtatcacatttatatgtggatttatatggggattcatatgtggatttatatggggattcatatggggatttatatgggggttcatatttaaattcatagtcatattgttatcttgctgtaaatttgggtcttgtttcattgtaattttaatcagtaagataaatgtctataattaaatgacgtattatttagtttcttatatacgaaaataaaataattttaggataattttattaaattaatggtattagttatgtcaattgcttaattactaccttaaaccagatgtactaaataatttaaaaatataggataaaaagaaaaaaaacagttaaggtagtatttttataatatagataccgtatacactactaacttaccacatctagtgaattcaggggaaatataggaagaacagaaagaaagaaagattgaaagatggaaagattgaaagatggaaagattgaagatagataaaaaaggtttttcaagatggagtgttcaaacggcatcgactaatggagttaaagaaatttaaagattttaaaatatcaaacaatcactcgggtattaaattgtcacaaactcaactgaaacaattaataacagtggatgatcttcaaaaaaatgaaacaaaacttcaattagtcaaatttgaattcatccatttaatgcatcaactattcatctcttaattaaacaataggcaaaaataagttaaatttcactaaattgcaataaattgcattaaatttgccgattaggataaagtataaattaaataattaagatttaaccgatctcaaaccagcccactggtttaattgcattaaatttgatgattaattttaaggtacacttgaaaaaattaacgaaaactctattattagcttttattataaattggtgagtagtaatgttaaatccattaattaatattaattattattaattattattaattattactaattatattagcgtaatctagttactccaagtctaggtcatctctttatgatagtattgatattattgtttcatattaatatactacattaatatattctatcgtttaaaaatgaaaaagtaatgacataacacatcatatcagcagaatacagaaaaagaaattaacattctcgggaataactcatcgattttatctttgctattttaataaatttgctcttgctcttttgctctttggctcttttcctgtattgctaaatttctttattgcttatattaatatatccctgtattgcttttatcaactcttgctctttcgataaggtatataaatgaatgctttccttatggcctttcccacattggtacagtatgtaatatgtaatttacaaatatctaacttacattgtttagtaataccacacgatatcatacatgtgtgtgtcaaaacataaatcgttatgacattatcttcgatatatggggtgtagctgttactagtatatcaatctccaaaacgtacattattctctatttaactaatcttacgtaataccgtatcaaaacacagccaatcggttatatgaatgtgcatcaggtgttactatatagtgacatcactgttagcagtaattgtttgattataaagaagaaataatttaactctacttacatgatcttttattcaacttgacttataaagaagatctgagtgacaaagttcataattttaggaatctttgaattatactttaagtccaaccctaattataactttatagtcgctcgtattaattggatattccagactctaaacttcttaaaattgcaaagagcagatttctctttcaatatgtataggtagttctatagaacataattatcagtaaatacatattataatttgtcaatacatactacctatctgtttctctaatgagcataatctacataacagcatggatatatggtttgcctaatttccaaaaaaaagaccggtcatagcacctggctttcaatagttcagtattaatggttttcagggtctataatatgtgtctcttattggtacatcgttaacgaacattaaatatactacaatagagcattatattaaagtattagaaaatttctttgtcgttattgaacgaaagagactgttagatatgttatgaaagcattcattactagggtatgttaatgagtacataaaataaaataatagctatcattattgactataaaggaaactggttaattaatgatattatacatagacttataaattgaataaatggtgtgtatgaatttaaaagtgtcgaagatatctttaaagtgctaattactattcactgaaatatgagaagatagtccataaaattgaagatattgaaaagatcattaaagatgtgttcatgatttcaaggaaccccattggtaaactgaatagtatgagtaaaatcttatatgaagatatagataacttttgtttgatacttgaaatgatgggattattacttgcgcaaaatgaatctggtaataatgaaattcaaagagttaaaggtataggaggaagtaaaagaaagataattggagctgatgatgataatgataaagaaaagatatagttgataaatgtgatgttgaatggattgaaaagaaatcaacgattagaaatgatctgttgaaaagaagattaatcttgaacaggttgctgaaaatatagtagatttaaaatatgttaaacttgatgatattggtgatagtatctaaagtattgctttgttttgataattgaaagtgttacaacaattacaggtgttggtagaagagaatatttgaagaatttttcgatccaggattaattaatatggttgcaaaagtgaaagcaaaagaaacattccatattccagttaaaaatgcaaaacacaagccaaagtgttaacgggtgctaagcttattatttaggaactttataccatgttgagtcaataaatttacatgatataatagagttaaatctagcactaaattttcaagagataattacttgttgctgtatggccttattcaatctgcattcttctcttaagcttcaaaatatagtgaaattatcatcaacaaaattgctacgcacctctgtaaagtgtctaggtttcaaaattcttctgtgaaaaacaatcaaaatgaaagctatatattacatgttacataaattatttagtgtttatgaatagttatttaacataatttactattttagatcataggtatcaaatcaaatcaaaccaattaatatacaattataggagtagtaaatatcaatctttaagatcctaaatatcaataaacttacatttagctatgcactgctactaattatagttaaacgatcaacagaaaaaaattctttttaagaacctactagaaagcttcggtctttctttacattaactaatgactaattaactattaggtaatagtggttaaaagtggaaaagaagtggaatgaggggaataagtggaataaccttcctcattgggcaagtgaagcgatctggaaatatggggcattgtcccaaataggaaggtttagtgtcctttgacatgaaaattatttttattagcagatttttcaagggttctgtcttaatttaatttatagaaagtgaaaagtttttcacttgacattaaaggtaaacattggtcaggatattttatattggtatatatatatatatattaaccatttactgttctttctggttatgattcatattcttgttattactttcactttccattaaataagtaaaatattacaatggtttcaacaacttcaaatgttttagctacaattggtacaatttgttggtgtgttcaattaataccacaaattatttataattataaaagaaaaaatactgaaggatttccagaattaatggcacttttatggtgtctttgtgcaccattttttgcaattttcgttgttattgaaaatgcatcaattccaattatgattcaaccacatttatttggatttttttgttggattttatatattcaaacaatgtattatccaccagttttaagatctaaaagagaaattataataagagctggatcatttttaatttttgaaattatattagaagtttcatgtattataccattaaggaaactttatattaataatggaattaaatttcctgcattaattttcggtataattgcatcaatttttttagcaattggattaattccaccatattttgaattatggaaaagaaatggtagagttgttggtattaattttttatttttattagttgatttttctggtgcaattttttcattagcttcattagctgttgataatgatgatttagatattatgggattagttttatatttaattgttgcaattttagagagtggtattttcatttcacaattcatttggttacttagatttagattgtttaaaagagaaaagaaagttgatgaagaaaaggatggagaggacaataaagaagaaaatgttgaagaagatgttgatattagtgaaactgaattagaatcttcaaagagtgaaattcaacaagaaaattttaatcttactacagaaaaggagtttacttttgatgatttttcaccattaagtacaaattattgaacaatagtagtatagatcatcatttacatgtaaatactactacaatattgtgtcaataaactaattttatagatttttattcattcttttgtgctttttttttctagtttataactaatttaatctaatttaatctaatgtaattctaattttaatctaagtttatcttgtcatagttttttttttaaaaaaataaataatatactatactatagaatatgaataaaatgataataactttaagtattaaattattgtttgtaatatttttagatatgaatttatataaatctaacatgcatcaggttgagctgcaatgaaatcaactgcttgtccaagagttttaattttatcagcttctgcatcaggtataagaattgaaaattcatattcaatttccataataacttcaacaacatcaaatgaatcataacctaaatcttttgaaaatgaagtatttgcattaagttcaacattttcaggagttttactataagattctaataattcaacaattctttcattaataagttcctttgttaattcaggagcatgactgtaaaatcttacttgtctattataactattattttgtaaataggatgtgaaagcaactggtgcctttaaagtagaagttcttgcagctgatgaagctctaatagcgagtcttgaactgttaacaatggatctaaacatgattaattgaacctgttaattgaaaagtaagtgtctatactgtaaagagtgaatttcccctcagtgaaggtcttactttgaagaaattcatgaaattttgaaaaagaagcgggtaattttaaatttagaatttttcatttccatttccattttcatgataatcttatttataaacactttattcatttggaaactacaatgttacgtgctatgggtatagtaagagtgggtcatatggctctctcttcctattagaagtataaataatcctattgttaactttaaatctattcaaccaagttctatttcttcaatatcaccaatttcatcaattttccaattatcacaacaaagatttgcatcattgaatcaacaaaggaaaggtcgtggtttaataactaaaaaggaaagagctaactaaatctcctcatttacaaaattgtccaattaagaaaggtgtagttatgagagttatgattttaaaaccaaaaaagccaaattctgctcaaagaaaagctgctagagttagattaacaaatggtgaaattgtttcagcttatatacctggtattggacataattgtcaagaacattctgttgtttatgttagaggtggtagatctcaagatttacctggtgttaaatatcatttagttagaggtgcaatggatttagctggtgtagcaaatagagcaacttcaagatcaaaatatggtgcaaagaaacctcaagcaaaggaataaataagttcttcacttaactaaattcttgtaaatatataataatatcatctataaaaattattaaattataaatcttttaaacatttttcataaatttctttatcagaatctgataaattgagttcaaatatatcactattatcattattattatccttttccttaccttcattattaatatcattcttatccttaacaaatttaatatcagtaatttctttattgtttctattaatttgtttacctgaataaacaacttttttaaaccatttaaattctccctctccataacataatgtaattgcattacctgaattacctgctcttgcagttctaccaattctatgaacatattcctttgttgatgttggtaaatcataattaataacaaatttaatacttgttaaattaatacctctacttaataaatctgtacaaattaaaatacctccagtttcatcaaaatttttcaatattttattcctttcttgattattcatcattgaattaatacaatcaatttgattatttaatccaaaggatttatttaattcatttaataatttatttaatcttatggttgattcattacttttagtgaaaattataccaaaattattatatttattatcaaatttatcaatccatttaaataaatttaataaaattaatggtttataatatgataatttttcagttatccttataactttttcattcaatgatttaggtaattgatataattcttgttgattatcactattaacaataactaatcttggtttaaataatcttaaatgtgttaatttctcactattggttgttaacgttgcacttaaaactaatttaatacatcttaatttgaaaagtttatcgatatcattattaaaagtatcgttattatcattattttcaattttattcattaataaatcacaccaatcttggaaattttgattcaataatctatctgcttcatctaactactaaaaatcttaaattttgtaaattaattgaatttaaattcaaatgttcaactaatctacctggtgttgtaattaatatatcaattaaattggatttaaatctcttattttcttcattaatacttaaatcaccaccacttttcaatgccattatattaatatctgtacctttcgttaattttaataaatcagaataaacttgttgaactaatggtttagttggtaatattatgattgcacttaaccctaaatctttaatcttattaccattagttaataattgttgaacaattggtattaaatatgataatgttttacctgaaccagttgctgcattaattaaataatcaccccttggtgttggatctaatttattacgttttaaatcttttaataattcttcaattaatgtaatttgaacagaaaatgcattttcaattttaaattcattttttaaatttttcaatataatatcttcaatttttggtttgaattcaataaagggtttcgtagttgttgaatcataatatgcaggttttgttaaccaatcaagattttgatttttatgtatttgtgaatataattgtttatcacgtggtaattgtaattgtggtaatggtgcaacatctttaacttcaattggttcaatattttgttcttctatttcttcatcttgtccattaactagtggttgtttcttcataactttttgaaatcttgttagcactgatttatgtgcatttttaatatttatactatcatcttcctgtatttgttgggagttagattttgaatctgagtcggaatctaaatctgaatctgattctgaattactagagtcagaagaatcatcctctgaatctgatcctatttcttcacgttttcttttattatttgtttcttccgctatttcattatcttcattttccatttggatatcaccatcatgatctttttcaggtattatttcatcattttgttgaatattctttttatttttcaatttcttcaaaagtatttctttcttctcttgtgtggaagtattcttagatccggttggatcataacgtgctgcaaacattgcttgattctcagatagttgttactggtattacttagtgaaaaaaaaatttttgaaattttgaaatttttcatgttgaagtgagaaagtatttaaaatagccatttctttaatgttataagttactacttctttctttctttctcttcacaagttatacattctgcattgagacagtcagtttgatgctctttcaccaagattaaagaaggattggtatgagagatttgactggctgtttgaatcagagttgtgattgatacatacaaaaactaattgtatcatttttttttctttcatctcaagatgatggagaagataacttcatattttactaattcaaaagatcaagattttaaaagcattatgattttacatttacagatattatattagatctaatatattgcgaatcttcatgtttgatttaaatcaatttcttgatttgttttggtttaatccgttatattgaattaatttattgttgtgatttagttcaatttaaaacatcgttcaagttgtaattgaatgatttcctgtatttggtcgtttaaaagttcgggtaatgcacgtttcttacttaaatgagttaagtaatcttcaattatttcacataattcatcatacctatcaaatttttgataaatatcttcattttgataattaataaactgttcaactttttgattgttttcgtcaatataatttttaatatttaaattattttcgccaaagttttcaataaatttgagtaactgctcattaatttcatcttcaactgaattatgatatatcttaagatgatcatctaactcattaataatgttggactttaggcttttatcatcagctttagaatttgcagttagtacatcaataatgaattgcatttgatcatgcatatcgtttcttaattcaacgttatacttatccatttcatcattggcttcactgtatataagattttccttgtcctgagcaacataattttcaaggttcttcaaagatttggataaagattcagtttcatttttaattttctcctccaataattcaataatgttatcattttttgattcaataatttttgatacttcttcattatctattttcaattgattggtataatctgttaatttattatttaactgttggttatattcattcaacttttgttctaaggtgttgtttaatactttttgtgcatgtttttgatcattaatttgattcatcaaattatactgatccattttgtttttattaagttcaagattaaaatcattgtatatattttattctccaacttattcttttcagaaacaaatgcattcccaaattcgttcattgaatcacgaattttaccagcatccttctttatatcattcatcatattgtctctctctttcattaatttttgaaataatttttcattatacttatcattactatcttggaattctttaaatttcttttgatgttgatcttgttatgaatatgattctttttttaatttatctatacattacgaatattttcattttcatttaacttaattttaatatcatctaattcgtttttcgatttttgtatagtttcttcgtgcaataattttgttatttttatcaccaccggaagaattaataatattgttatcattattgttaatattgtaattactgttgctatcatttcccactgtattgttattaatattatcgccatctaaataatgtataaatcagataaattttgaatttaaagtacaatttaaaattttatttgacttggtggtatcgacttccttgttgctcttagtggagagcatcatggtcagtttcacgcctagttcatttacttatctataacatttatatcttctatacatagaacaaattttcattaacagtattatttcagcaaacaacctcaaagggtaaaaccgaacatggtgctctcactcagagcaataaggaggttgggttcttatccccaaaaccaaggaatctgtctcaatttaagttgctcataaaactactgtacattcatttaaatagatgatcaagatacatagaaattttgcaagaaaaagtaacctattaaccattcacagactgagtatcaaatagatccataattcatcgtaatatcttggtcctaaaaatgtgtggaagtaatggtcatttcatcgcataacataaaggcattcttgttcactgtaatacttcaaaaacagttacaggagtttgttgtctactgttatcattattatccaatttctttaaattctcaatatttaaatcgtcatgtttgtcattttctttattattattatcatccttatcgtcatcattattgtactttattatcatttttttctttatctttcaaatcattttcatcacgaactctctgtaattgttcgatttctctttgtaatttcaaaacttccttttcgaatttcttaccataataatcgacataatatgcagcaccattataagttgcagataagaatattaaagacacaaaaagtgaacaaaaatatttatatttatagagtaatggacataatgacattgtaactaattgatataaatattgtaataaagtaaatgcaacaactgggaaaggttcaggtaatgaattaacaaatttaccaattggtttatttgcaaatgattttcttaaatattcgaaagaagtcattttaccatttttaattttttcagctttcctaattgtaataaaataatgataacttaattgccaaataaaataaagtaatgaagtattaattataccataaaagatatcccattgttttaatttaactgaaccattaaatctaattaatttataatcataaggtaattgatgagttataacatacattataattgcaggtgtaacatgaataaaagttgaagtaattttttcaatactatgtaaaactaatttattcttccaagttacaacagcaaatgataatgatccccaagaaaatgaacaacatgaaatataaagcatttgactatcggggaagatccaaatataaatcatcaataagaaattaacgaaataacaaagatcaactaaaaaataaccataaccaattttataatacattaaatatctaattggcatcaataagatgaataagaatgaataaaatatatgaacatattgaggatgactaccaatcaatataccgaaaaggaagattgtataaacagttaatgaaaaaaatattttttcagtttttgaatttttttgagtttcatcaattgctttataagttttatcaattcttatatgtaagatttttttcaattttaataaatcatcatttgacatatttatatttaatttatttaaatttaatttatttttcttttcattataataattttgaacccatttataagtactatcacgtcttttctttaaattaatattcaaatttgaaggttcaagtaattctagtaatgttataccatctaatgaaggagtacttaaaagtgtgaaggaatttggagttgttggtggaattgaattagagtctgatatattatcattatcattatcattatcatatgatgatacattgtcatctataataacatcaattgaatcccctacccaaagcagcagcagcagcggtactatcactcataattcaaagagcagacactgatataataaataaattgctatttacctctgtaatcaacatcattgcttaataaaaggaaacgactttaaattaataaggataggaggaggctcactgtataatattttaaaatgaccaattttcacatgctaaaatttatttacttggaaaaaatttttatggcacgttggggtttattataggactttctttaggggaagaacactgtgaagagtgatgaaaatggttgttacacgtagtaggaggacgcctgtgcgtgaggtcactaagaagaaagttagtgggaagaatggggatattgtggataagacagataaggtagataaagtcgataaaacagctaaaataggtaaggaagggggtagtaaggtagagaaaatgaaaaagttgaaaaaattgaaaaagttatcaaaaagacagaacctaaacccaagggaaggaaaactagtaggagagtcccatcaagaaacaacagtgaagagacagatactaagaaatcatcagagatgaggcaaagggatgttaaagtatatactgagggtgaaatgaaaggtagaaagatgccagcatataaaattgaacaacttgaaaggctacagagattaattgatttatcatcagctgctaaacctagaggtccaattactcaaatagattatcaaaagaaagataataatagtaataataataatttaggtattaaacttttattatccaaagataataaggaaaaagtgagtaatataacacattttgaccctgaaagaaaaactttttaaatggtactattgaaaatgataaattaaataaaattattaaaagatatgaaaaaatacgaaaatttaagaatattaaagcaccaaatttaacaaatgataaattattgaagaaagtacttgatgaagtaactgccaaaaatgaaaatttaatgttttggaaaagttataatgatgaaatagagggtaaaaattttggtaataataaatttttagtgaatgagaaaagacttgataaattagaaatttctgatactcaaagggaaaatttacttgaacaaagacttgaaaatattattaaaggtaataatgaaaatggcgaagaaaatggtgaggtaaatgatgataatgatgatgataatgatgaaaatgttcaagaaatagtgaatgaacaacctattatagagggtaaaaaatatgaaaaaataaatataagtcaggaatcatttattactaaaattgagaatatgattaatataattgataaatatgattcaaataatgataaaattattgatgaagaaacaattttagatggtttaaaatacgaggattatagtacagttagagattttaaaaataaaagagcataggcatgtgtatttataggatataatatataattggatagtatattaacgttgatgaagggtatttgtatttgctaattgaaatccattgattgaattattatcatcttcaatgatttcaagttcattatcatttctaattaaattttcattatctcgttgttcattatgtgtatgattatctatttcaatattattagaagtgtcaatttcattatcattattaatttcattatcattatcattattgttattattattatcatctatattaacaatttcttcattaatttcattcctccattcccaataaggtctaaaaattgattttgatttaaataataatggtaattgatcattaataaaccaataaagatgaccaattaaaatacctgataaattaattaaccaaaatttataattattattacgtcttgataatgaaatatctaataataatgaaacccaaggtacccaaacacttttaataattaaaacaaataataaaacttcaacatttggatttctctttgtccaaatatataaaagagcagttttcaatgttggcccccacataaataaattaacaattgataaacaataaaaataaattaaagatattaaaattgttgtcatccaaatatatgaataagatgaattaaatgaagtttctaaccaatttgaatatcttgtaaaaaaatataatttagtgaaaaaatctaatgaaattgatccattataaagtaaatttaaaggtattttccaaattatattagtatttattaaagaatctgattcaattgtaatatctgatgacttaaataatccagtatattcagctattgataaagcagaagataataaaatataacttttcgttactggtggcattgtttgtagccattgtaatggtacagcttccattgttatatgcagttatgaataaatccttatgataaaatgatgatgtgttaataaaaagagatagagagaggtattaataaagctacttacttacgtaatgaaatattgaattatttttttgaaatttcaacagggcgtcgtataaagtttgttaatggctcagcttgatctgatttatcttctttcaagagaggtatatagatatggatatggatatagatgatggggtgttattaccatatacatatttgaagaataatactagtggtaaaggatttagaaataaacttttagattattttaatttattctataaagttgatgataataaattagagataattaaagaatttattgatattttacatacatcaagtttgattattgatgatattgaagataatggagaatttagaaggggtaaattatgtgcacataaaatttatggaattggaagtactattaatgcaggtaatttaatgtattttaaagcatgggaattattaatgaagttagaaagtgataataataataataataatggtaatgaattaaataaaatatttgttaatagtatgattaaattacatattggacaaggtaaagaaatttactggcgtaataataagatatgtcctagtgaggaagaatatctggaaatggttattggtaaaacaagtgaattatttaaattatgtgttttaattttatcatgtattagtgatgatgatacaagagataaagataatattgatgaaaaattaataaaatttagtgaaaaagcttggaattatatatcaaattaggaatgatataaaggatattagagatgattataagaatggtaattattcataccctataatatactgtataagagagaaatgtatgaaaatggagtcaaacgataaagagatagaggataaaataagagaattaggatggtatcagacacagtgaagagaaaataatgtcgttaatgggggaaaagggaaagcgcgaatttgaaaatgatttttttcagttgcttatgtaatgatcaggataatatactacagtacaccacattttattataagtatatcatattagccaataggagacgttgaaaaagggagcagaccactttccaaagtaaaatttctaatagggtgattacctaatccattatttgaagtacctggtattcttaaagctttttttttcaatgtgggttataatacagtactgttaattattattatacaccttattaccttaatacttgatatatttgctcatttttctattatattaaattaaaatacccctatatttaaacatctacaccctttctttcaattacaatgtttgcaaatactattagagctgttactagacaaaatttaagatgtgcaattcaacctattgcaagacaacaattaaaaattaataattcatcattatttaaaatttcttcaattagaaattattctgatcatcatgaagaaacttttgatgaattttcaactagatatgaaaaagaatttgaagaagcttatgatttatttgaagttcaaagagttttaaataattgtttctcatatgatttagttccttcaccttcagttattgaaaaagctttaagagcttgtagaagagttaatgattatgcaactgctgttagagttttcgaaggtttaaaatttaaagttgaaaataaggaacaatatcaagcttatttagatgaattaaaggatgttagagctgaattaggtattgatttaaaggaagaattatttactgaataaattagctaaagtatttaatattaatattaatacaataattaaaattcattcatactcattaaaataataataataataataataaattacttttatttcaattctataatattataataataatatatttataaaactttcttctcttttcttattcaattcaatatcaaaataaaaattacaaatatttatttcaattaaataattaaaatcaatcgcaaacattcattatagtaattcattatagtaattcattatagtaattcattatagtaattcaattacaatatcatggtataatcaataaaataaaataaggtaatgaaaataaaataatcgtcccatcgacctctttcttataaaatacgtgtctctctttaaatttccttgtattctcaaagcggtaattagtaaacataaacatgtaaatacacattcaatttgttgtttataggttttggaaaaaatatattacattgtaaacatcaagtctatcagcatcttctaatagtctatatatccatcgtagtatcctattcactcgctattaccatatctaaactaacttactaacttactaactaatggataactaccaaggagatgtctgggttaccggattaaatttatccaatgatagaattttctataaaggtgaaataattaaaaaaattgattcaaatgaagacaataatgaacaaaatgatctttatcaaataaaattaactgataataatgatgaaaaattaataactgctcaattaaaggatattcaaaaggcaaatccttcagcttttgatggttatgatgatatggcttcattaacttatcttaatgaaccatcagttttaaataatttaaaattacgatattttgataataaaatttatacttattcaggtttattcttagttgcccttaatccttatcaaaatataaatatttataattcagattttattaaaatgtattcaacaaatcaacaacaatcacagaatgattcaaataattcaaataattcaacatcatcatcaaatattaaattaccacctcatattttcggtactgctcaaaaagcttttaataatttaattaatgaaaggaaagatcaaagtattttagttactggtgaatcaggtgctggtaaaactgaaaatactaaaaaagttatacaacatattttatcagtttcaacaaattcaaataataaagataatgcattgattttagagaatcaaattttacaagcaaatccaattttagaaagttttggtaatgcaacaactgttagaaatttaaattcttcaagatttggtaaatttattaaaattcaaattaataattcaaataatgaattatctggtgctcatattgattggtatttattagaaaaatcaagagttatatcacaggataaaaatgaaagaaattatcatgttttctatcaattattgaaaggtgcttcaaatgaaatgcttgaaaaattattattaaatacaaattcttcattaaatgatttccaatatttgaaaaatggtttaacaaattcaattgaaacaattaatgatactcaagattttaacaatcttatgaatgcttttaacataagtgaattttacagattttgatatacttaatattttacaaattttatcaattatattgcaattaggtaatattaaatttctcaaattcaaataatgatacaaagcaagcagtaatttcagatgattcagatttaattattgaaaatgtttcaaagttattaggtgtttcatcaactgattttagaaaatctttcttaaattcaaagataaaagttggtagagaaactgttagtcaacaaagaactgcaagtcaagctaaattctcaattgatgcattatctaaaactttatatgaaaaattatttgaatatttagttaataaaattaatgaaaattttaaaaatggaactgggaataataatgaaaatgaaaacaaagatacctcacaaaatgttttcttagattctccattcaataatgataattatattggtattttagatattgcaggttttgaaatttttgaaaaaaattcatttgaacagttatgtatcaattatacaaatgaaaaattacaacaattctttaatcatcatatgtttgtacttgaacaaagtgaatatatgaaagaaggtatttcttggcaatatattgattttggtaatgaattaaaaccaacaattgaacttattgaaggtaccaatattgataagaagaaaactaatattttctcaattcttgacgaagaatgtattgttccaaaaggttcggataaatcatttattgataaattattcaaagaattagaagttaaagattcaaagaaaatggatcaatcaaaattaatttttaaagcaaataagttaagagatggtttcgttataaaacattatgcaggtagtgttgattattctgttgatggttggttaaataagaataaagatcctctaagttcaacaatgattgaagtactttcaaattcagataatttcttaataaatgaattctttcaatcaaatgattttaatttatcagattctccaattaaaggttctccaagaaagaaaactggtatgtttagaacggttacttatcgtcataaggaacaattgactcaattaatggataatttatctaaaacttatccacattttgttcgttgtattttaccaaattctgagaaaaaaccaaatgttttcaatgataaagttgtgttagaacaattaagatgtaatggtgttttggaaggtattagaattgcacgttctggttatccaaatagaatcgattttaaaacatttgcatcttattataatatcttatctgattcatttttcaatggttcttttcaaaaatttaataataataatgaatataaacaaacttgtgaacttattttaagtgggttggatttagatcctgaaatttataagattggtttaactaaattatttttcagaaatggtgttttagcttcattagagaagaaaagagaagagaagttaggtttgatttttactaaatttaatgcaatcgcaaggggtaaaataataagaaatgatttccaaataaaacttcaaagattaagagcttcaaaaattttgattagaaatttcaaattgtatgatgaaaatagttcagatccatggtttaaattaatcaaatcattaaagccaagattagatgattcaaatatagttgaaattcaatacacatcacaaattaaaaaactacaatcccaattaaaggaacttcaatcaaaagtggataatgatctaactgaacaaactgcaactgctaataaaattgaatctttagaaattgaaattaatcaaaatagagaagttattaataataaagatgttgatttaggtgaatccagaaaaacaatcgttaaattagagaaacaattagctgaattaagtgaatcatcatctagattacaaaatgttataacggagaaagattctcagttggataaattatcaagtttaaatgttgatgaagtgaataatttaaagaaagaaaatgaggaattgttatctgctaaaaataaacttaataataaacttgaatctgaattaaaatcagttaaattgattaaagatgaattagcatcattgaaaagtgttattgatagtaaggaaatggaaatttcaagtcttaaacgtgaaaaaagagcaagggatactgaattatctgaaaatcttgatgaattaaagaataaagtatctaaattatctaaagaaaataatgaaattacaaaagagaataaacttaaaactgaatctttaaacaaagttgaagcggaattaaatgacttaagaagtaaatatagtactgtcaaggatgaattagctgaaaatttagtgatggttgaagattatgaatctaagaaattagcgtatgatcaatctgataaaatcaagaaaaagttcaaacaattaaaatatgaatttcaacaaactaaaaaacttttagatcaaaaaattaatgatgaaattgaattcaatgaaggtcgtcaacaatatatcaaagaacttgaagagactaaactcataatttctggtcttcaaaaggaactggaagttgaaaagaaagctacaattgatttagaattaaaacttgaacatgcaaaacatgaaactgaaagagcaatcaaggagaaaaaaatgttagaaattgataattctcaattgaaattaagattaagaactaataatcctgaacaagcatatatcaatcaatatgaaattaatgaaaagaagaagcaaatttcacctgaaactcataaattagctgaagaagttagattattgagaacaagattagcatctgaatcttatgaaaatagaaacttaaaggctatgattaaaaagaatggtaattatactgattatcttgataaattcaaaaactctagtacaagtagtaataactctcctactattgataattatagttttgatagtaatgaaaatgttaagattttcaatgatgttagtgaagctgatgaattaagagaaaaattagcaattgaaattgaatcaaataaaaggttacaagatcattatgttaaattacagaaagatgttatgtattacaaaggtaagaataagggtaatgataatggtgatttaaatccatttaatttattagatgctgattctttagaatacaagaataaattcttaatgtcagagattgaagttaatgatttgaaggaacaaattaaagatcttagaattaaatcaaaacaaaattcaaatattctctctgataataaaaatattattaattccaatgttaatgatgaaaatagtgttgatcaagttccaaatataaaattaaagcatgaaaatttaagattaatctctgcattaaatgaagttaaaactaaacttaaccgtttagaaaagggtaatagtggtaggatttgaacaagaagaggaaattattcagttgaaaaataatttaaaaactgttcaagttaaaaatagtgcattaacttcaagtgtggaactctataaagatagatcagaagattattattctaaattgtcaaaggctgaagttgaattacaaagtttgagtagagaacgtactaagtttatggatgaaattaatcatttgaaggagaaggataaaagatctcaatataagtatgaggagagtgatagtcaaatcaatagattgaatgaaactataagagatcttgagaagaatatttctgataaaaattttgaaattgcacaacttaaagaacaatataatagtttgaaagaaagatttgaaaatagtgaagaactgagaaaaactgtcaaatctgttaactatgaacatcaagaatctgaaatcaaaaggctcaatgctgaattaatgaaaagtttaaataaggaaactgagttaggtaaaatgttaaaaaaccaaaatcttcaattggaaatatctagaaaagatattacatctgttaaattcaataattctgaactttccaaagagaaggctaaattaacaaaagctttgactgattgtattcaaaagaatgaaggattattaggtgaagttaaggaaaatgtttttaaagttcaaaatctatctcaacaagtaaatgttttgaaagttacaaataatgatttaattaaagaacgtgatgatttattcaattcaaaacgtatattagaaagtaaacttcatgatattacaattaaatttgatgaacatttggcaaaggttagaagtgatgctaataatgcagttcttgttgaacaattaactgaaaaattatcattatctgatgctaatcttgcaaatatgaatgagagaatgaccgaaatacaacataaatatgctaaactaaatgaagaattcaatgaaatcaattcaactcatttgaagacagttgaagaaaacaaagaattaacaaaactaaattttgaattacatgaaaaaataaaatctaataatgaaaaattcaaagctgaacttcaagcacaagatttacattggaataaacgtatgaatgaattggatgaaaaattatttacaagtagttcaattcaacgtaatgaaaattacaaaattgataatttaaccaggatgattaaagatttagaaattcgtaataaagatttagaaagatcaaagaaacattcagatgaagaaatcaaacatcttgatcaaacaattgaaaagattaattcgagctatgatagtttagctaaaagagaaatggaagctcaattaagatgtaagcaattaacaaaggaaattcaaaaatttagagaagaattaaccatctaataaaagatggtgagttttatgtattttatataacactaataaatgtttaaaattttataataattaaaaatattagaacaactcaatgggtgaaaaaaatgattttattaaatatcacattacaatcaagtgtgaagataaaaatatcatgctcaaagaaacaatttaaaaaaataatagcaaatgcctgtcacccatgctgggagtcgaacccagaatcttttgattagaagtcaaacgcgttaaccattacgctacacgggcattgcttgtttaaaatatatgcaagaacattcttgctttgctattgtatattacagtaagcaaaactagcaccttaaaatgaaagtatgataataatggaataagttttgtcttcttttctgttgatacacaaagccttaaaaagataaaaaatttagaggccattgttatcagcaaaaattagtcctttagcatccttttttatgaagttttctttaaactttatagattagaataacaaaaaaagattgtttattatacatcgtaaaaactatacattatacaactatttgttcaaaactgatctcaattcaatgaaacattttgacagctggtggtttgacatgaacaacaactgtgctagaataggtttcaacagcatcttgaacaaaatggttgattcaacattattaggcaagagattgagaattaaaaaggatcaggaagctattatcaaacttttattttctaaaacagtcataatgggtgaattcggtaagaacactaatcacaaaccatgttgcctgaaatattaactgcttgtggtttagttttagatattcaagaatgcatgttaagaattagagattacagattcaacttatccaatgatagattccaaacactcaatcaatgggaagaattagcattaattatgaaattgtctaaatacgaaatgccaaataaacaaatttgcgctcacttagcagtcaattttgatttagattatcattgtaaggatattttagagatcatcgaagaatttatcaataaggaagacaatgatattcctttacttatcgatgcagtttaaaacaaactcaagtcattaactaacattagatcaaaggaaaatgttttgaaagaactcattaataaaaacctcaatggtgtaacaactatactccaataaataaattaacaatgttgagaacaataataacggaaatcatagtggtagaaatgttagaagaagaagaaatcctaataattatgttatttgtggtgctaatcatgacacaagagaatgtgatagaagattcgataatggttgttggaaatgtggtaatttcacttcatgaacaaatgcccaatgatgattcaagatcaatgcaatttcaacgatgaagctagatcaattttagaaacagtgtaattctagatgactatatgaaaatgtataacaaaacccgaagataacaaccaataacaaagtgtgacctatacacactagttataaatggtaacttatacaagcagccagtaacctaatgctggatgtttgtacatgaaacccactgttgatatacttgtagaaagaaaacaacatcaaaaaagcaaaagagatattaggaagatgtttggtgggaaaatccagcgccttaaatagaaattttgaaacaaagacactcatgcaaccgtttagtcatgatcattttggcgttcttctacaatattctattacaatttcagtcggttgaacacagagaagggactgagttgtttctcggaaaataatgacatcctctgtgactaatataagtactgttccagacttaatatctacaggaattacattgtcggaaaggaatagttttggccgaaatagcattgctgagccagatcaagataatgacttgaatataaatagaaattataataaaaatgatagaagaaatataatgaatctaggtaatcagaaatccaacatcaataattccacttcaagtcagaataaaataccacaatttgaagctaaaactcaaaatattcatttattgcataaacttataaattcagttgaatcttttggtaattttggatcattagaaatttcatcggatggtatttgctttagtataagtgatggtaatattagtaaaattagattgaatttaaataaaaaagtttttgatgaattcacatttaatggtctttggagaaaggctgaatataccgattctgatttgtacgcagatgatacagatttatcgaataatgaagatgatgatgacgatgaagagggtaatggagataattatgttgtgaatggttttgataaagatgctgtgattataatacaaatcaatttaacttcattccttgaaactattaatattcatgttagggagaaaaagaacatggatacagatgtaacttgtacattcagatatgaaagagatggtgatccatttttgataatttttgaagatgaatcaattgttgaaaaatgtgagttaaatacgtactatactgaagatcaagctaaaaaacaaaagggaaaacgaaagaagaaagcaaatcagaaacaaaataataatcatattaattctgaggtattcgatgaagaaaatgaattggctttaaaaatgatcgataatatgatggatgatagtatttttagactagattcaaccaagattttatttgatattattctcaaggcaaatatattacatgatacaattaaagatatgaatgacctaagtactgaaaaatttatcttatattgtaggaaaaccaaatcaaatgagtttttaaatggtattaaccatgaaagtacaaatattaaaaataacgaactgattttcatttcaaaatccaaatctgatactattgggttttcgaaattaattattcctcaaagaaaaactaatattccattatttaatctattcaaacctgttctaacaacatcaagtgagaatgaatatgaattcaatgattgtaacgatttatcattatcttcaacataccattttgaaaacttttctaagcttttaaaggcaataaaactttctaaaatgattaaaattcgaaaagatatgaatggaataacatcattacttctattattagggaaaactgaatataatcaacaacaagaattaaatggattatatggttcaagtattgaatttgttacactagagagtataccattcaatgaactttttcacaattaacaatgagaatgtaaatgtatctttattgggtaaattaggatatgaaaataagtttgttgaacagataatcaaggatgatagagatattcaaacaattagaattggtaatgatggtcaactgataacattagatgatttttttggaaatgttggagcagaatttgaacaaattgagaatcataatcatagtaacatcaacaatttcagcaatatacataatgatgtagaatatatacccattgagaaaattaacgagaagaaaaatatcagtaagaaggacagggaaagggagaaagaaagtgataaaaatattttaaaacttactgaacaattaactatgtcattattaggacatccaatacctgttggtggtgaatcagataatggagatattgaagttgagaaaactatgtttgaagatggagagaagtgataatgaaaataacaatgtaagaagaaggaaaagagcatcaaatgatattaataaaagatctagaattccaaataaaaagactaagagtaaaaagaaagatgataaaagtggtaatgggaatgggattgaaactgttggtggcgcaattgaaattccattgtttatatagtatgtaagaatgtctaaataagtttgtatataatgaataatgaatgtggtagcttctttaagtttaattgcataatatctgtgtcattacactttttttatctaacatttaaagaaagcgtcgggtggtgatcaagctgattattccctttccagggaatgcgtccttagtgatcctcccaaataaataatttttttaataaatctagtacaattttttattactactattgctataagaatatttgaaaactttgctcatttattaaagtattaaaactataatttaatttctatggcgtgcttttcactctaaacctaataatacaggctctacaattgtatgaatgtccccacttcatgcttaatgaacgcttaaagtcatttatattacgtaatcacatctttagttggtatgtactctacaaagcatgtagttccttactttggtgtgacaactatacctatttttcttcaaattgttcaaagacaaatgtacttcgaacccaacatatctaataaaaactaaaatacactgtagcattatcatattctattatcagggtggtatactaatcttggttaattttatgctaaaacaaatatctactaagttatggaaacctaggcgtgaaataaccactaactaagaaccaaatctttactatactaaattatattaaggtgtgcttatcattatcattgattaccaacagtaaaacacttcaacacaaagctgagccacttttgaaatttgtgacttttatttacatctaaatttaaatgttccttatttttaacctttagctaatctctacatgattagtaccgtttttaacagaatggttaatagatttcaattccaatgataccttttcaaactacacaaacattgagataaacccaatcgtagtttgagcccccaaatgtaaacaaaagagtgaaaagtaaacaaaaaaatggaattttaagaaaaagtaaacattgaaatttgttagacttgtaaactctctaggtatgacttacgtaataatatctaataataagatctactaaaggacgatttctctatatctctataagaatctatataagaagaactacataactattagttattcccacatattatatcctgtgggaatttgccctcttatacatatctcatgtaacgagttgccccgttacctatattatgatattattactattaatatatcatttacttacgtaatatatcttacgtaattatattctatatttatatcattcctgacatctcggggggttggaaaaatgtcagtaaatttcaatttgcttagcatttgaatttctttcaatttatatttatattttagcaataagatattttataatttgattaatctcatattggattaaatattttgtttataattcattcaatcaccatattaatcacatattggattaattattttatgatcgattaatcacatattggattatttatattgtttaatcacatattggattatttctatttagactcagtatattctaagcaaaaagtgttgtttatggatggatgttctaataattcatgaagtttagtgaatccaaccgttttggttagcatatctgctgggttgattgcacctggtatatgttctatatcaaataaacccattttataataatttcttaacttgtggtatgtatttagtaataatttttccttgaaatcaggtcttctatgttgttctttaattgtttcgactactggcaaattgtcacaatatatagtaactattatattattatacccaaaatcatctagtgtagttttaatatcacatgcagcttcaacagcctctctaactgctaaaatttccgcttgaaaactgcagtctgtatgttgtactatcctataactttttgatttaatatacctctggtttaatactatgtaatatcccccttggcttgtatgaggtaagtgagatgcatctgtatacacgtcaagttttattggatcatcaattctaccatctatatttcttattagttctttatcttccctaatatatctataagatgatgttcttgttgtatatacatattttaaaacttgtagtgcttgataaaattgcatgattgtaggaaaactactatattgagctaacatatttgcatgaacttgaatatcaaacctacccttttgtgatatatatattaaaatacccactaatttttgatacattcttaaactaaataattcatgcgggaagtgtggatgttgttcgtagaatgattcataatttgtcgaattatgtttttctaatactagttgttcaagttttttatatttttctttatcgtttttaatccctttgatttctttaagttttttcatcaattccacttttaactcaacacttttttcattaggtgatataagtgattcaatatcgatatcatctatatctaactttggatattccatttccatattcacattttcatcatctcttctattacctatttcataaagatttttcaaaatatttttttctgcttgtggtatctcaccatcaataagatcaatgtttcctatttttctagttggaagctttatgaatgttatcatttcttctggtaaatcattaattgctttttcaatatatgtattcagacttaaaattaacatattattaacctttgcaatatcataacctaaataatattcagggtctcttgttatttttaatgcaaagttgtctaataataatttttctaatttttttgcacagtgtgatagtaacattatatcatcaacatgttccacaataaatgttttataatcaatcgacctatgtagacattcgtcggttataacatcttttactattgagtgtagtacgcttactaatttgtcatggaatgcttttggtgatgtatttaacccatatgcatgtttttctaatttaactaactttgttgtaaaacaatcttcaaaaccttgtggtctatctaaataataataatgttttggatcaatttctgcatgtaaaaaagctgttgatatatcatatgttgtaatatctgttgttttatcaattgcatattgactaaacattaaaaaacatgactcttgtcttgccaccggactacttgcctctttatttttctttccaacccaatctctatgaattgttatcaatctggattttggtgtcattaatggaggttttaatgagaataaccaaaaagtatgcatttttaaactatgcttaggaagcttttttctttcattaattttactaaacacattcaattttatgaaacctgccatttctttttccacagatggtttccataatggatcattttttgctgcatagacatttgatggtattttaatatttttctttattgctgtaattttttgatagaataattgtggaacaaatatcaattcctcatttgcttgtctaattggtttatttctatgtaactcaaaactttttaatactctatagctagtgattaactgtgttttatgttttttgttatttatcttcaatttataatccatatcatatcctataaaatacccttcttctgcttttgaattatcatcaggagtcgtgtaaaacacaacatcttctaagaatagtggcaattcaggtaatgcatatcctgttccaaaaaacaatcttgctggttgtgattctagatattgctctcttttatatggttcattattttttctttcaaaatatctgcctgctggttggtcatatttaatactagaatgtggcaaatgattatatatcattgttgcatattggaaggattctctaataaaacgtttctccgactctgggtttaaatgtgccgtaatcaatttttgtaaagtttttaaagtttgtaccgctctttcagcagtgccgttccattgtttattaccagtaggagccaaatccatatgtggttcaattagtacttccattgatttgtttccatatatgtttgttgtataagctaatttataaaattctgagcctttatctgttgttattctttctggttgtcttttatatgttgtatgctgttcttgaagccacttgtttaatatatctttaatatcatgtttatttgatgttgttgccgaatacatgaatttgctatattgatccacgacaattaccacataccatttgtgttttcctctgataaatggaccagcagtatccacatgaatttgttgaaatacttcatcaatgtttctctcttttctacctgttgtaggtttcattttatgttttgttgcaatacacgtaagacaattttttacttgaaactgatcttccttttttatagggatttttaattcttttaaattttttaaactgatatgtccaaaagcacaatgtaatcttaaaattggactagctggagccgttttcatttccaatttcaaaagttttgtatcaaccatcattaagttcacagcttttttatgtgtagtatttcctataaacaccattttttgttgatttttgtttatttgtttttccatctttaatttgtacaatccatttttttcttctatttcaataatataattttgataacacttcacttaacttatattcagctaacttgatcatattaaatttgacatttttttttgtaatttctttatcaaaatcatcaacaattttaattttttcaattttataacctttactgtataagttttgtatatccttgttttttagaattttaccaataataattcctcctgttgaatcatatggtgtattatcaagaataaatttctcgactcgtttgtaccatgattctactgtttcagatttatttggatttttttcatcagtcaactccttgatagaatcgaatatttttcctttccaggattccaataaatctttgaatatcttctcctctgaattattacttgtcatatttagaactgcttttaacctgttagacttgtaaactctctaggtatgacttacgtaataatatctaataataagatctactaaaggacgatttctctatatctctataagaatctatataagaagaactacataactattagttattcccacatattatatcctgtgggaatttgccctcttatacatatctcatgtaacgagttgccccgttacctatattatgatattattactattaatatatcatttacttacgtaatatatcttacgtaattatattctatatttatatcattcctgacaaaattcgagggtaaatgttaaatgtacaaaatgtaaacaaaaaattacaattttggccttttttcacaacttcacctggtattatctctacaaccaaaaagtcttacgcttagcggagatcatattcatcaatgcgatcattagagcattacattgatacaaaaaactcggaaattgattttttaaggggtcttatctatgtagtatcactaaggataaattgtttatgtaattattttaatttaaaaaaaatgaattgcaataatttgttaaaatttataaagttttcaaaaatcacaaatcacgtgacctcaaaaacaggatggcaggaaaaaattcccactaagaaaaacaacaacaagatcccttggcccagttggttaaggcgtggtgctaataacgccaagatcagcagttcgatcctgctagggatcagttatcttttgggcgtgtggcgtagttggtagcgcgttcgccttgcaagcgaaaggtcatcggttcgactccggtctcgtccaatatattttttgccatattaaaattttttgtaatcttttaacataatagtaaaaataagcgggcctgaaccggtgaaaaggttgaaaagtgacgaaaattgatttcccactatcagtcactgaattttattttggttttggatgattcataatagtaatcgttaacatgattttcaattttcaattttcaatttttattttcattttcattttcattttcattttcatcattttcaattatcttttctattttattttaagttatctcccttcatcagttaagcaatgttatctggatctctaaggttgactcaatgtactcgttatggtactttgaaccaactgagaaattattcttcttcaactgctgcaatggcttataaaaatttacatagaaataagaaaagacctcaattaccaacaattgaacaaccttcactctctgcagattctgctgttagttccattatttatgaaactcctttaccttctaaaactccaaaaactcaacatgttttaaattgtttagttcaaaatgaacctggtgttctttcattaatttctggtactcttgctgcaagaggttttaatattgattcattagttgtttgtaatactgaagttaaagatttatcaagaatgactattgttcttggtggtcaagatgcagttattgaacaagcaagaaaacaaattgaagatttagtacctgtttatgcagtcttagattatacacattctgaaattattaaaagagaattattattggcaagagtctctcttttaggtcctgaatattttcaagaattagttgctcatcataatgattcagattcaactgtttctgaaaaattaagagcttcaagttatcatccaaataatttacctccttctcaagctctgagacaaaaatatgaacatttagatgcaattactaaattaacttcttcatttggtggtaaagttgttgatgttagtgatagaaattgtattattgaattagctgctaaaccaaagagaatttcttcatttattgctcttattcaacctttcggtatcttagaattagcaagatctggtatgatggcattaccaagaaccccaattgatggtgttgacgatggaactgatccaactaaggatgctgctgatgtagttgatgtttctcaattacctccaggttagttgcatttatttaattttatacttatttcctataccattgaaatgatcaattaattaatcaaaaagattagaatgaattcatatacacacaaacacatatttatagtttatataaaaaactgaaaaattgaaatcagagatttgaaacaaaatgagtattagtattgtagaggaaacaaatttaaagaatttataatataagaattaaaattctttgaattaatggataaagtgttttctatatttgtactaccatcaaataccttaatcattctattgtaaagatataattcaaaatttatactggttttgaatttatagttctctaaactattactataaagatcaaataaaagcataaaagtttcgatcaattttggtcttaactttaaagttaaaaacaatgacttatttaacccattactaatttctactgttaatggttcaatctccattaatccaatatcaaatgatttcatagatttactattttctaaataaatttccatgttgccaagatctatatctaaacttttcactaaacttgtcgttgatctaaccaataatcctttccaataattatctatttcatcatataaaagatcatatgaaaataccaaatccatactaaatgtaccatcactatttaaatatattgaatcattttgatattgtatttcaatattatttgtaactatttcttggatcaatgaaaaagttttttgttgaataaaccatactaagtaactataacttacaatcgatattaacaataggaatacaaaattttcaagatcaatacgcaatattcgtttgatgaacattaccattcactacaatctatatctatcttgaagacagggatgatttatttaacatgaataaaatattttaatatctgaaagaaaaactcatcgaatgaagcataagcgcagatctcagatatcagttcgaaacagaaggtccttttttgtgcgattgtgacatgtcacattttgaaatttacataatacttactatatatcataacatcgaaagcttccataaaactaagataaaactaattcaaataaaagaaaaaaactgaacatgaaaaagaaccagaaagaaacataaaaataaagaacccaaataaccttaaatgctcatatacaccaaacataaaacaaaatcattaatatcaccattagaactcaatatccaatggaacactgatactactaaccggtaaaaatccatttaaaacatagactttaacctttgcatcacctcttaatcttaactttgcatcagaatcaagtaaaatctttttcaacagaccacgaacacctttaccatttggccaaagagttacaaacaaatccatatcagtacttttaccatcaacaattttaacataaaatggatgaatcagcacatcacctaaatttaaatcttcctccttaataggatcatagacaatcagatctaattcatcaatcttcaaattcaatcctctcataacaaatccccccttttggaaataatttctgatccaaaaatcatcaatgttagtataattattggtattagtaccagtaatttgtaaatcaataccaccattatctccaaatcctaacaatttaatattatctgtattgaaatatgtaccttcagcaattccatcaccaatatgaggttcaacatgaacaaagaaaattgttatcagtgtaaatataagtgtaactattgcaaatattggaacataaatgtgtaaattgtacttataggtttgatgtttcaaataattgtattgcttaatagctttatctttgaaagtatcattagagctacttcctaattgtaaaattccttcgtcgttaataataggcattgctattaacaaatttcgttgtacaataaaagaagatgctatgggctatgtgcaataagcaaggcctgttatcagccatatattaatagagaagtgatgattaaatttttacgtaacatgataaatttttttttcagtgggtgaaatattttttgttcaccaatttgatgatatatagtaagagtattaatatttctttggaacagcaacaataccccacacaagatgttatatatgattggtttaggtcttgctcacgaatcagatattactgttcgtgggttagcagcagttaagaaatgtaaaagagtttatcttgaagcgtatacttcaattttaatgtctgcagataaatcaaaacttgaagaattctatggtcgtgaagtcatccttgcagatcgtgaaatggttgaatccgagagtgataagattttagaaaatgcagatgttgatgatgttgcatttttagttgttggtgatgtttttggtgcaactactcacactgatttagttattcgtgctagagatttaggtataccagttgaaagtattcataatgcaagtgttatgaatgctgtcggtgcttgtggtttacaattatataattttggtcaagcagtttcaattgttttctttactgaagattggagaccagattcattttataataaagtcatggaaaatagaaaaattggtttacatacacttttattattagatatcaaggttaaggaaccaaatattaaagaaatgatgcgtggaaggatagtctacgaaccaccaagatacatgtctgttgcaacttgttgtcaacaattattagaaattgaagaaaagagaaaagaagaagcatatactccagaaactccatgtatttcagtttcaagattaggatctccaaatcaatcatttaaagctgcaactttgaaacaattagctgaatatgacgcaggtgaaccattacattccgttgttatgttaggtagacaagttcatgatcttgaattagattaccttttagcatttgctgatgataaagatgcttatagaaaagctgttatagcagatcaagaatatttcaaacctccacctccaccacctgctccacaagatattatttcttcagatgaagaatagattttacttaatattaattactaaaattaaaactattttttaaaacagtattatataaaacaaaactatactaatgtatttttatttaacaaggaagtggtttgttaaattaaactttaatatgaaatctattcgatttctaataaagtctttaatttcttgattaataaccagtcttctctcggcacggtacttctgaaagctggatcttttaatgtatcaatggattttctagtgattttagaatataaaccatccttttcatcaacatgtctaccccaagttggttgttgaccagatggtggatctaaacgcatagcaacaccggcatttgtatcaccttttctgacttgatttctagattcatgattaacttcaagagatgtaacagtacctaaaaccattgcagtctttttacctgtaaccggatctggtttaacagcacaaattggggtaccaattttaacacaaccttcattaacatcaacaccaataatcattggatttctcttgttaataatttgtaaagttttcagaacacatgggaaaattgcatcacctgcatttgcctttctcttttcttctaataatttttcttgatatgcagtaaattcatcaaataaatgataaataacatcagcactgaaaagtttaacaccttgttcattagcatattgttcagcttctttatcgactttaacatcaaaacataacataactgcaaattctttagctttatctaacatggcagttgctttcataacatctctcttataaactggacctaaaccaattgacatgacaggaatcttcatatccttcaagaaatctaataaagcttctaaagaacctaaagttgatgcttgaacggtaacacccctaccagttggatcaacagaatccaataaaccagttaaatcatccataacatcatccatcatttcatcttcatcatcaccatccctaacaactaataatctagaacccgcaactgctttttctaaatcattagcagcaatcttaacacctaatgctgccttaacttccttatgatgaacatattcagatttaatacgtaattctcttgcaggtggtggggttaataaagctctaatatttgtagcaattggaccattcataccacataaaacaactctatcaccttcatgtaaaacaccattagataaaataacatcaatagtagtacctaaaccttcaataaccttaacttctaaaatagttgcttcaacatcagttaagtattttaattgtttactcattctcttttgagttaattctaataataaccataataaatcagggacaccttcaccggtaaatgcagaagttggaacaatagaaacatatttagacatgttggtattcttgtaatataattcactgtttaaaccttgttctgctaatgcaaccttaatttgagtgaatcttgtttcaaattcagatttaacagaagctttttggctttcaaaagattgacggaatgaattgtttggagttgcaacccaatcgtataatctatcgattttattcaatgcaacaacgaaaggtgcctttctatctcttaataatctaatagattctaaagtttgttgttctaaaccatgcataatatcaataactaaaattgcaatgttacataatgaggaacctctagttcttaaattggtgaaagattcgtgacctggagtatcaatcattaataaacctggaacttcataagaaaccttttcatgagcttgcataaccttagttttttcttcaatagattcaattgggaagtaagtagcaccaatctgttgggtaataccaccagcttcaccaccttgaacattagtttgtctaatcttatctaataatttggtcttaccagtatcaacatgacctaaaatacaacaaattggagaacgtaattctttaccatctttagttatagtagtagtttgtggtaataaagattttgctggagctgaagtaaccggagctggtgcaggagttggagtaacaggtttcttgatttcttcaactttgttttcatcagagttatcccagtccttttgtgtgaattcttcttcctccttttcttccttttcttcttcatctaaaacatcagcagatgcttcttcatcgtcatcatctaatgccatattttcccaatcatcaattaaagcatcatcatcatcatcttcaccatcagcagatttcttgttagcatttgatgaggcattggagtcagcagaaccagaagcagaaccatttttatcaaatttcttacccttctttttatagttggaagctcttgccttttgtggtgcatcagatgataaacctgcaactttaatattaccagattgtaataaagcagctcttctcttttcttgaagtgccttttcttgcttttgtttcttggttaagaacttaccttctttctttaattgttcaaccctagccttctccttttctttctttaatctctttgcttcttctttctttgcttcttcttcttcctttaacttttcttcttgttcttctcttaatctttcttcttcttcaagacgttgtgcttcttcttcagcttgcttctttaattctaattgtctttttaaagctgcaatacctgctggaacttttttaccctttttagctggtgctgcctttggttcttcagttttagattcagtctttgaggtttcggaagttccagttgaagtagattcaggttcaggagtattttcagtagatttggaagatgcaccctttctttcagcaagttgtttctttctttgcttttctctttccttcttttctctttctttttccttcttagttttaataacaggacccttttgttgttgttcagctaatttagccttttcttcttcagcttgtttagtcttcttatccttcttattctttgctcttttcaaatttgataagaaatcaccaccaaattcatcttctgcacttgcaacagttggaccagttgattcaacatcagcagaagcttcagcagcatctggatttacaccaaattcttctgcttgtggttgttcattctcaaattcttcatcccagtaatcctggttagcgttcttctttcccttctttgccattgtatttagctaaggtgcatatcctaatgaaaagaaacttaaaattgcaaatcaaataagttttacaaaccctccaaagggtgaaaagcgttaaatttcatgctgggaggaaatcgatgaattttttttttcactggaagaaatgaaaaaaatttgccattttttttgtctctgtgactttttttataaaaggaaccactttttccgtattttgttatactaggatttagttaaaagtagctacttgattttctcttttaatcaaccactatatagggacatttacatgactaagtctgcttacatacagacctagtttaatgttcttggatgggagagaaatgctttttcttacactatccccagtttgagtcttatgcttgtattcacacctgcatcggatatatgagcgggatcacatttttagttgtatcatagtttattaattaattaattattgtaaatttgtaagtataaagtttctataaaaaagatatatataaataaattatctttatttaccaagtgaatagagaactaatttcttatagccatcaacagcttctagaagactatcagcagtaacatattcattatcaccatgagcaactaaaattgaacctggtccatataagtatcttttaaaacctttatgatctaattttggaatatcagttgcatatgaagcaatgtatttctcaaatccttcaacttgataatctaatgaagttggatcatcagtaactgaaacttcaaattttaattcctttgcatatgattcatacttagagacaatttctgcaacaactggtacaatttcatcagaatcaacagctgttctcattaacactgaacatttagcatatggtgaaacaacattaccagctgtaccaccattcattaaaccaatattaattgtagttttatttaataattcagatgatggccatggatagttttctaattcatgcattatttcaattaaaatcttatcagcatcaattccaacatctggataacccgaatgacttgcaagaccgaaaacttcaatatcagccatataaatacctttatgaccagctgctaatttattttcagttggttcaccgaaaataacggaatcccaagtaacattttccttattaaaataatcatttgattttctcatacctaaacctccaacttcttcaccaaatacaaataataaacttaattcatcaattgtaactaaaccttcttcaataagttccttagctgcaataacttgagctgcaactgaaccttttgcatcacatgaaccacgtccatgaattttaactgaaccatcatctgaatcttcttcaacataataattaacataaggaggaacagtatcaatatgagaagttaataaaactgatgaattttgtttatgttcacccccgaaagcataaatatttctattagtatcatcgatttcaaaattataacctaatccaaggttatttaaatatctttgtaagtaacccgaaacactatattcattaccactgattgattcaatattaattaagtcggcatgcaatttgaaaagctcaggattctttttaaatgcatcagatatattagagtgtttacttactttttcaatatttaatgaaagttgttcaatggattcaatagcttcttcccaaatatttggaatgattcctgcattaattgtcaatgctaatgcaattatttgtaatgaattgagtaacataattttcttggtgaatgagaagagaagaaaagaagaaaagcttacaacaaacttccttcttaaagataagtttacaggatgcttccttgattaaatagaagtaagtttatcggtatcgtttcctaattaggaagttccgcaatttttcagtaactcatttgtttaactaatatgcccggactacctttattattgtcatgtttatgaatattgagctctttgatacacttttagtaaactattttctataaagtaatagaaatatagcgtacagaaagtgtaaaacctagttaccaatataaaattaatattaaaattacaaaagctatgagcataaactagattacgttatttcttattattactatattattacatctctattctttaaccgttaatcatcatcaattatttcttcttctgtagtttcatcatcagtttcatcatcatccctattatgtataacattattattattattactactatttgatgacattgtgatccccatacctaaacctaaagttgtttgatgatttggaaacttatatcggttttgaacattaccatcactactactactatgtcgacgagatgttgattcattatttaatatccctggagcagataatggcatatttaatgaattgggtaatggaggtaacattttatttgatactccatcaagtgaaggtaatcctccactaaaacttttagttggagatgcaaattgctttggcggtgaaggagagaaagaggaacctgattgatatttatttggtgatgaaagagaaatcaatgaaataattgcatcttgttctaaagcttgagaatctttcttcttttcatttgtatttattgataaattatttttttcctttggtttaattggtgatgtttgatatcccaaaagtgatgatttagagctactatttgattgcattgaagttgaagttgttaaaggaactgaaaattcagatgatttttgatcaactgatgatctaaatcctctttttgcaatttcatctaatttaacagatgcaacaaatgatgatcttcttggtgatttatgttgattattattattattattattgatattactttgattactattattttgataattattattaaattgaatatctgattcttgttttggacctggtaaattattagtttttaaattccaaaaatcttccaactctttttcttttgttgaaggaattggattacttatatttctacgaggacttgaagcaatttcttctagtgaatgttctaattcacctattgacttatttgaccaaccatgttgaaatttaacatgagcataatttaaacgagttcttaaattttcacttattttcctaatttctttataatctcttttaggtgatttgagtaaatgatcagaatcatattctttatgaatttgttcaggtgatttaacagatgtaacattaaacagttcaactgatcttcgttttagatttttatcatcaaatctaacttcaggtgattttaataatgaataaaaatcattaccattacgcctttgaggagtttgtagtaaattattatttgaagtttgaggtggtgataataatggagtatcatcaaaattttgtatatgacgtggaactctttcaggagtttctggtattatagatatttgagcaggtgaagcaaatgtagaagattttggtaatgaaggagttttaggacctttaatttctgagtcattatcattagtaatggtaatatgattattattattattattattattattattcatatttgaattatttgatgatgataatgatgatgctacttgggctaatgatggagtaggttgtagagttcgtacactattcattttaggggtaatatttcctgttgatgttctgttgttatatggatttaattgatcgagcccctgattttttagtttattattttcctgagttttattaagagacataagaatttacagggaaggaaatgcagtgggttttaatagttgaaatatatatcaagaagaacgaaagggattatatacgaaggtaataattaataaaagaataaaagagcaatacaataaacaatatctttattgtctctaaataataatacatcaaaaatatcaaaaatataaatattgacgttacgttattaaaagatactctaaatttaacttattgtttgctttatttactttatttcttatttaagaagtgtaactgtaccatcactgtatgtatagtgtatgtactaagattataattagatgccatacactgtaatagtagatagtatagatagtataggtagtaaaagcagtaacggcaactcagtttaaaccaaattggtaatcttataaagattatacggggtttagtatattagaaagagagacagatagatacagatacaatccagagataggagggtatgtataagtagattacaagagacttattatagagccattaatacagttatacagttaaagcagtattactacaatagagcgagggcaaatctaagtattattactgttgatgctcagcaattatattttggtgtcgaattttaagttgttttggtgtttgtttgattattgttcttttctttgggtctttctttcttctgattgaatgacaagataatataaaaggtaccatatacccttcacaggttattatttcatttcatttttttttacttctgtgcatgaataatgaatctgaataccccctttaaaaattataggaaaagaagttcttcgaaaaatatttcatctcctgaacctgtaattgtcccacaaattggtacaagtaatacaccatctaatttgtctaccaaaaataataatattgtaaaatatagtgttttgtatcgtaaattcacaaataagaagaataaaacttgggaaggtgatggtactttaatttggtatacaaataatgatattgctttaataaaaaatgaagatgatacaatgatttgtaaattgaaagatgcaaataaatcaattttaaaaggttcatttagtggttcaggttatgaatttgaattagatgaagaaattgttacatctaaaataccaaaactgactttatctagtactccaactcaaattattcataaacctatcattaaaccatttaaatcacctcttttaactattaattcaaataataataagaagaatattataaaaaatatagatcaaaaagatcaaaatggtcaaaatatcatacaaaaggataaaattgtcgataataagaaagttcaagatataattacgaaatcttcttcttccaagcagacaaaagaaacgaatagattaaaatcttcagatcccttatatgatatcaagaatgtccaaaatccattattcatgccagatttccccaaaagtattgatgatagtgaaattcatcgtaaagttgtcgttgatcccgtcttatctgtaaaattacgtgatcatcaaagatatggtgtagaattcttatattcttgtttaatgggtttaaaatcaagtgatattaatggagctattttagcagatgaaatgggtttaggtaaaactttacaaaccataactttaatttggactttactaagacaatctcatattgtgggaaagaaacctataattgataaagttttaatttgttgtccagtatcattggtcagtaattggaaaaatgaattttctaagtggttaggaatgaatagagtaggtgtattggcaattaatggtaataaatttcaaaatgaagttagagatatacaattattccctaataataaagtttatcaagttatgattataggatatgaaaaaatgcactcaatgtctgaattgttatctgaaataacatttgatttattaatttgtgatgaaggtcatagacttaaaagtagtgaaaataaagctatcaaaactcttaaaagttttaatattaaacgtacaattttattatcaggtactccaatacagaatgatcttaccgaattttatacaatggctgattttgttaatcctgggattttaggaagtttaaaacacttccagaaaaccttcgttaaaccaattttaagttcaagagatgcaaaatgtactaataaagcattaataaagaaaggtaaagaaaagtcaaaggaattagttgaattaactaataaatttattttaagaagattgaatgacgagttaacaaaatatttgccaaaacgttcagattatattttatttattgcaccaacatctttacagttacaattgtttaaaacaattattgaaaccaagagattccaaactttaattgatggggaaacggatgaaaatagtagtaccatcaaaaactcatcttcatcgtcatcgtctcttaatcttatcaattcatttagaaaaatatgtaactcaccttcattattgaaaactgactcatttttcttagatatatctgagaggagttctaattctgctgaagatgtagagtttagaaatcaacttggtaaaaaggttaaaagtggtaaaatattagtattgatcaaattattaggattattatatgctaaaaatgatgaaaaagtagtcattgtttcaaattttacagctactttagatattatcgaatcaatatttcaatcattaggattagcatttacaagacttgatggttcaaccccttctaatgaaagaggtaaaatcgttgacagtttcaataaatctagtacaactaaatcttttgccatgttattaagtgccaaagctggtggagttggattgaatttaataggtgcatcacgattaattttatttgataatgattggaacccagctgttgatttacaagcaattgcaagaattcatagagacggtcaaatgaaagatgttaaagtttatagatttttaacaaatggttgtatggatgaaaaaattttccaaaggcaattggttaaacaagatttaagtgatagatttgttgatcaaaagggtggtgaaaaagaaatttttgatagatctgacttaaaggatattttcacaattaattttgataaaatcaaaactaaccagtattgtaatactcatgaattaatgtgttgcgattgtaatggtaagggtgaaattgtacttgagaatgaatttggaagtgatttagaggatagtaatgaagaaagtgacgaggatgaggacgaggaaactaaagagaagaaggagtttatgtcagcattagattatacacaaaaatacccagataatgaaaatgaaaacaccaaagttgagtgaaattaaaagaaaaaggttaagaagatgtttaaaaggttatagacacatccaaccagttcaatcatcaattgtatttaaaacagatgatgatatattagatacccttttgaatggtcaagatagggaaaaacctctgatttcttatgtctttggtaagtactagataatttagaatgttgtataatattgttaaatgtagaatataatttatagaagtaataaataatcaaattccaccatcccatacttgaacaacattatcgtaaaagctacaacttacaattcgtattctctacccaatcaccaccataggtaatactagaatgttctcccttaaaagtactaacaacttccacatcttgtgcgttctctgaattataacttacaattctaccaccatcatacatattacaagtcatcactctattatcatatctatgaggagaaggaataagtctccaaacaccaccattcaaattatgtttctcctttaccattggtggcatacctgggaataaactaccacttgatatattcaaacctgcacgtaaatctaaaacgcataattgatcatcataaccacctgtccaaatcatatagggatccgtaacattttcacaccaaccttttcttgatgtaagaatagaaacaatacctgcatcatgaattctattcgttgcaaatactgacattggttgccttatatcatgagctataagttgagcatcatcaccaccactgaaaactacaccatctaattctggagcatgtgcccaatcagcataccatgcctctaatgaatgttcagtagggaaaatggtcataccttcctcagctgatggtaattgttcatattcgtagtatcctaccatcccagttgttgtggtgaaagatatttgtgaatttctggggtgaaagttgattgaagttatcaatgtttcattagatgatgaggttggtttaggaaacaattgaacattatgtaattgatttatatttaacggatcagacttattgatattccagaatgttatattaccagttgaatgtgcagttgatattaaaaatgattcgttatttgaattaattgatttttcatcaattttgatatctaaaacagcaccatttgtttcaatagaatttatacacataccaatcaaaggcaatgagctaacattaatttctggattatcgttatcagggaaatcaccaggagtatgataattttgagaaagtttccatacttcaatagttcctttacgattatgtccttcaattaaagtgtaagtaccgaaatagacaatagttggatctaatggattaatacgtaagcagcagggaggtgcatttgtcttgaacaatgcttttctatttaaaccagtcattgaagaaaggaagtaactgatgatggtgaaaagttggttgataaagttagaagaaacttttctttaaatccgggaaataattttgtcggcgtttattaaggtaaattgatctgaaatcaaagatataggtttggactcattattggacattaagtcaattgagtcggtaaagttgaatttcagcaatccatgaaattagcagaaaatacattttcataacacaataataatgactcataataaagaagtgatattaaactgaagtttcctaaatgtaaagataataaagatttataaaataatgaaatttgcgagtgcatgaatattacttgagacttttcttttactaacttttcattttattgtaaatacttttttgtaaggaaaataatgtcagaggagataccatatacaaagagatacgtttacaatttagatcctgcaatactggattcattaaaaacgttatattttgactcacaaacttttgaacaacgttcatatgaagacttcattaaacgtagaggtgatgaaatagttaaaagtatatcagatgaaaaattatcaacttcaccagttatcgtgtacagcctaaaccacgtataaacagagatgaaataaatactgcattgtccaatttaaagatttctaaatctgaagaatatgaaaataaggatgaaagtggcaaagatgataaaggtattgattcagataatgaaagtgagtcagacagcgagtcagaaagcgaatcagagtcaaatagttgaagagaaaacattagagacaataagtgaagcgaccaatactaatatcagcaatgatgattatgaatcaactataagttttatgagtacaaaatcaccacttgttttatttgaatcaagaattttaaataattcaacaaaggggaaagttttcggtgtttataaaactacaataaatgcaaaagattcaccgaattatgatgctttaaagatgataagggaaatgtcacataatactgataatccaatgcctaaagatccaaagattgcaggtatgtcagcagttttcatgctctcatctggtcactttgctggtgcaattatatcccacttaccacattcaactaagggtaataaaggtagcaatgaagaattacaattacaatcagttagattacttgcacataaaacatttcatagatatactacacgtagaaaacaaggtggttcacaaagtgcaatggatgattctaaaggtaaggcaaattctgcaggtagtacacttagaagatataatgaacaagcattaggtaaagatgttgaaggattgatggatgaatggaaaccattattagatcaatgtgaatcaatttttattagaggttcaggtaaaggtggtaaaaacgctagaggtattggattaataattagagatgcaaaagatcctaaagcaatcataaaacatggtgattcaagggttaagatgattccatttggaactaaacgtccaactacgatggaaataaagagagcttggtgtgagttaatgtatttgaaaattgtagatatgcctgaagttgaaagagatttgattaataagagaatgaaaagagatgagatgttgaataaatcaaaagaatctaaagataataaaaacggattggatgaagagaatataaaattaactaatgaaattatttcattattgaaaaagtcaaaggcacctggcttggttttattcttcaaaaaaacaagagtaagttagatgttaattttagacttcaacccgttgagcaatataaggcaactcccaccgctttacattatgcaagtaggaaaggtttgtcatacatggttcaaacattacttgttcaattacatgctgatgcaagtattttaaacaatcaagataaaactgcatatgaaatagcattagataaagataccaaatattcgttcagattaagtaggagcttgataggtgaagataaagttgattgggagaagacacatattggagcaccaatgacaaaggaagaagttgaagaagttaaattacaacaacgtaacaaagaagaaaaggaaaaagctgctgaattgaatcaactgaaggaacaacacgagaacattgtcgatgaaatacgtaaagaagaagcacagaaaaacaaacgtgtaggtagctattcaaatttgatcaatggacctgggattaccaaggtaactgaagaacaaaaactttcaggattatcagatgctcaaagaatgaaagttttacgagaacagagattcagagcaattgaggctagattaaacaagggggtataattttttttatatgtagttacacacatgtaaatgatcaaaactatcttttagacaaaacggattcaacccattcacgtaatttctctttatctacatcattaatatctgtattactattttgaactttttcatcaacgtaaatatcgtaaggtaaagttttctttaatgcaacaactgatggaattttattaacaatataacgacgcattaattcatcatttctaccacctgtaagttcaatacaaacagtaccagtattttgagtttcaacattacgtataatttcccacatatttgttgccattgaattactcggagtttcacctaatcttacaaaagttgcaaataaagttccatgagaactttcaggtgatgataataataaatcaaattcttccggtgtatgaattgtttggaaaactctaccgttccccttagctggtgtatctggcggataaataattggtaatgaatttttcaaaggtttattttttgcatataaaaacaggccaattgtagcagcagcaaatataccaattcccaacagacgatttgtaggtttattaacgggttcagacatgtagaattatatgttcaataatgattagtaaaacacagtggagttaataatctcttaataacgagaattagtcagcgaatggaaacatgatttttcagttatcaacacttttttgacagaattggattaatggagtcagtggatgttggaaattgtagactgtgattttcttttgatcactgtatattattatcgtatatcatagataaaacaagacacaacatagcattaacaaatatgacagacgatattttcgagaatatgcctattatctcaccaacagtgacgcatagagagggtgagaatgatgaagttgaaagtaaaggaaattctgttgttggatctgattcaatcgaaagattcaaacatttacacaatgagggagaaaatgcagaaggtagatgtatgtcaccatttcatacagttgataaagcggaagaaaagagaagattactgccaagtaaattaccaattgtacaatgtattgcaagagcacgtattccaacaacacagggacctgaaatattccttcatttatatagtaatgattctgataataaagaacatctggcaattgtttttggtgaagatattagatcaagatcattatataaacaacgtaaaggtgatacacaatctgaccgtatgattagaggtgcatatgttggtaaattatatccaggacgtcgagatgcagattttgataaaagtacaggattaaaattagaatttgattcaaatggtgatatgatcgttgataaaaatacaacatattgtgatacaacattagtacgtattcatagtgaatgttatacaggtgaaacagcatggagtgcaagatgtgattgtggtgaacaatttgatgaagctggtagattaatgggtataaatggtcatggatgtattgtttatttacgtcaagagggtagaggtattggattaggtgaaaaattaaaggcatataatttacaagatttaggagctgatacagttgaagcaaatttattattaagacatccagctgataaacgtagttttggtatggcaacagcaatattaattgatttaggattaattgaaattgatttattaactaataatcctgataaaattattgcagttgaaggacgtgatagacaagttcatgttcatcatcgtgtaccaatggttccattagcatggcaaggtgaggaaggtgttaaatctaaggaagttgaaggatatttaaggacaaaagttgaaaaaatgggacatttattatcaaaacccttgtaatttataaatacagtattgtaaataatttttaaagaataattttgaaaaccaagtatcatacattattattattattattattattatcattataaattattaaattattaaattattaaaattaaaaaagatggtagataaaattacaaaaggtgatgaatggagtgagaataataaatttacacaaaatatagttaaagaataaaattatttcttcaataatttttcaatatcatcagaaattgaagctggattctttaaagaagaatatctttgataaactttaccttctttatcaacaaggaatttttcaaaattccatttaattgctttaaaacctaacataccagatttttcagatttaagccattcataaattggatcagctttatcaccattaacatcaattttttgcattaatgggaaagtaacaccgaaattaatttgacaaaattctgcaatttcttcagatgaaccaggttcttgacctgcaaattgattacatgggaaaccaataatttctaaaccttgatctttatattttttatataaagcttcaagttcagaatattgtttagtgaaaccacatttagaagctgtattaacaataagtacaactttacccttaagattttccattgggaatggttcaccattatttctagttgcagagaatgtatagaatttagacatttgtatagatgatttgattgatgagtgtattgatctcttgaacatacaaaaaataaaataaatcaaaataaatcaaagtaaaataaactttgtgtcaagaatattataaaaaacagaggggagtggcgagttttataccctctaaggtaagggatttaaaaatattatgtaaaagggggctcagttagtactacagaaaaagattccagattcacctggtgagattacaaattctttcttcttttaccacttttaccaccgataacactccgagtgttcttattattattaatctttctcttcctagactgaccgtcttcttcttactgctcttcttagccttcttcttgttgacatattccttaacaatagcttgtaacaaggtttgacaacgggccttgatctcaactgcatttcgacttaatatccagtaatctccttccataaataaatgttctccatattgaatctcattgaatatttgttctccaaagtattctccattttcacctccaagtcttaacatttgaacaattaaccatcgatcctcctcaatactccattccttctttgtagcagtatatggtaattgaatttccatatctcttaatggataatcatattcactaatcttaaatcttaatgcttccctttgaatatatgctctcctaattttttcttcacctgcttcaatttgtccaatatatctatcataattctcaatatctctaaaattttcccaaaattttaaactatattgacaaacttcttcatatgttttatccttaccaaattcttttgctatattaattaaatcatatctactaaatcttgcatttgcattgataaatgtgaaaaaatctcttctactccaattactaaatccttcctttaataaaattttcttctcttcctcctcttcttcagttaatggtctagcatgatcaataatcgcttgttcaatttctaaatcttcaatactcttattcttactacctttctcatttttagctttaatatgccaaactcttttgtaatatgcccattccatttcataaattctatgtaatctctcattataaaattgatgatcatataatgctaaatgctttggttgctttaattcaaatgcatcctctccattatctccattaatattaccattattatgttgtgcattaaccatttgttgatgtgaactaatacctctattacctgtttgtaaaacctctctataatatccatcaactgaataattattctttctttctctcttacttaatgctaaccaattataaccttcatgcaatactcttaatctctttcttttggaaatttttaccatcccattcataaactgattcatttgatgatgaaaaattttgtaaatcatcaagacctaattgtgaaaatttattttttaattctcctgttctctcttcactcttcaattaaaattttatctaattcatcatcatctaattcaattttttcacctccattataatctttaccatcttcattaccattattactactattacctatttctatcagttaaaacatcaactgcaccaaattgaatcatatttaataattcatccttattgttttgtgcattatttttcttttcattaataccatttctaccttgttgaataactaattgatctaatcttaatttttgtgatgctctctctaaaactttttcctcaattgcattctctgtaacaaatctgaaaactttaacttgtttcttttgtccaattctatgagctctatccattgcttgtaaatctgcttgtggattccaatcagaatcatataaaacaacaacatctgcacttgttaaattgatacctaaacctccagctcttgttgttaataaaaataaaaatttatcactaccttctttattatattcatcaattgcttcaattctatcagcatgttcagtttgtccatcaattctacaatacccccaatttctgaaaactgcataatcttctaaaatatctaacatacgactcatttgtgaaaaaattaaaactcttgaaccttgatttttcaattttttcaataatttatctaaaactaacatcttttgtgaattgaaaactaaatgttcatcagttgtatatggtggtccaggttctgcaccttcaaataaatatggatgattacaacattttcttaattgcattacaatatttaataatcttgatttagattctttcttaccatttgaaccattaactgcatcaatatctttctctaaaattgattgataccatcttttttgcattttagtcataccaacataaatatttaattcttgctttggtaataatgatttttcaacatcatttttaattcttcttaataaaaatggttttaataattgatgtaattgtccaacaacattatctctattttgactctcactatttccattttgctcatcattatcaatttcaccatcatttgagaaccatccatcaaaagttgttgaatctgcgaaaatatcaggtaataagaaatttaataatgcccataattcatgtaaattattttgtaatggagtaccagtaattaataatctatttttagaatgaaacatacgaatgaatttgtgataaaagtgaatcttcattctttaatctatgagcttcatcaacaattatatattgccaattaattttctttaaaatagccttttctctaataacaatttcataagatgaaatcaaaacatcaaatttacaatttgtaatattttctttaataattctatttctattttcttgatcacctgttaaaatacatgttttaacttctggtgtccatttagaaaattctctttgccaattttctaatgttgattttggtacaataacaatatgtggacctttaactttctttaaatatcttaaataaccaagaaatgaaattgtttgtaaagttttacctaaacccatttcatcagctaaaatacctgataaatcatttgtatttaatgaaactaaccaattaagaccttgaatttgataaggtcttaaagaaccattaatatatttaggagatttagtaaattcataacctgaatcagttatttctccttcatcatcatttaataattcttgtaattcattattttcactcttcattaattcattatcctcttctttctcagttttacgtctacgatgatctgatgaattatttgttgatttattatttgaattagttaaatcattaactttttctaaaacacgtttaaaattttcatccttttcagctttaacattaagaaaatgtttaaataatggtgttaaagataataaatacttaaatctttcagctgttgcatcaacatcgaactttttcttttcatcagttacaaaatatcgtctcttcttttcatcaaatgattcctgatcattgacattttcaattccagggtatttggaaataccttccatatacttacccaatgcatcatcatccacttgcattgtcatggctatatatcctataaaaatatcctataaagccctaataaaataaaaggaaacactactgtccactaacaacaccaaaaagaagcacaccacacagtagaaaaacaacaaaacaaaaaaaattgatttcctttcgcgacttactaatacttacttaatactttacttactctaaatgtcctacataattacgtactctgtagtccatatgcacaaaacatctgttaacatatggtaatgtctcaatggcatattgtagtgattcacctaaatcatgtgcatcccttaaattcatatctacattcttcaagacaatatcaacttcaacattgattaaatctccaatatgatacattctgaaattcttaattttagatatttcatcactgaatctcacaattaaatataatacttgttgatattcctccttggatgcatgtgatccacttaaatgattaatatgttcaaatgtaattgtaatccattgtaacattacatataaacataataatgatgcacctaatgcatcaatccaccatatttggaaaattaatccaataactgggaaaattaatgaaaatacattaaatacaatatctgtctttgcatcttcaactaatgcttgaattgatgaatttttaacatgtttacataaaaaatatgcaataagttttgatgaaattgtaacaaccataataataattgaaatattagataatttagcaagttcatgatcattatctttagaaaataattctttaacagattcaattaaaacttgtgaaaatgataatatcataataactgaaaaaatcataactccaattggttctaattgttttctaccaaccgggaatcttgatgattttttcattgcaaatttattagcaacaaaaataatcattgttgaaagaaaatctaatgatgaatcaactaatgatgcaataagtgataatgaattactaaaatagacaacaacaaatttacccaataaaaggataaaatttaatgcaaaattaaaataaattgcaaatataacaattttagatttaccatgatctcctgaacctaaaatttttgcaccttctaaatcaatgttacctggagctgcactaatattaatatgacgatgagttcctgaactacttgtatgtgtcattttaattgatttaggaacagttaatggagtttcatcattagcattagtatttgacggtattgctgatgttggaccaattatttcatcaataagatgagcgttctcttcttctgaattattctcagatgatgtgttatctgcataattttgaatcatttcaatttgaacaccagtatctaataataaatccatatcttgatatctattaatcatttcattttgttcttcatagaattctttaacttcaccatttttaattttatccagtttattttcatcaatatagtatttttgccaattaatcaatctactaattttaccaattaatctaaaaggtcttaatgcttgtaatgaatctatacgattatataattcaccaaaatcactatttgggaaaacacttaatcttctctcataattgagtggattattaacactaataggaacagttatatcacctgcagctttagcacaattagagaatgtctttgaacgatgaattaatggcattatctcctcctctgtcattttatgatttaaacgtcttggttctgtctcattgacttcagcagagtagagtggggttgctgcgttaatgggggtttcctctgtcgacatacctgtatatttatataacaccaaagcaattacctatacaaaccagataaaaagaacattggcaacactttacttcagtttattttacttcaacaaagcaatacacttgatatatattaattaacctatactcagccatcatcacatgacagatttccatgcaacatgaattttttgcgatatttccgggtttctcttctaataacttttaatcactgattactaaacacttcttttcctttggccaaagtctatctattctaatgactactgtatccaaccgtcctcaactctccgcactaaacgctccagaaccagaacactgtcctggtccagaatcaaataacgcaggtaagggtgaagcttgtcaaacttgtgataacaaagatatttgtgaatcattgccgaaaggtccagatcctgatttaccattaatagctgaacgtttatcaggtattaaacataagttactggtgctttcaggtaaaggtggtgttggaaaatctactttcacatctatgttatgttgggctactttcagctgatgaagatttagaaattggtgcaatggatttagatatttgtggtccatctttacctaaaatgttaggtgctgctgaaaatgaaactattcatggttcaaatgctggttggtctcctatttatgttgctgataatcttggaatgatgtcaatacagtttatgttaccttcaaaagattctgcaattatttggagaggttctaaaaaatcaactcttataaaacaatttttaaaagatgttgattggggaaaacttgattatttagttattgatacacctccaggaactacagatgaacatttaagtgttaccacatacatgaaagaagtaggtattgatggtgctttagtcgttacaactccacaagaagttgcattattagacgttcgtaaagaaattgatttttgtaaaaaagcaggtattaaaatcttaggattggtggaaaacatgtcagggtttgtttgtccaggttgtggtggtgaatccaaaatttttaaaccaactactggaggtggtgaaaaattagctcaagagttaaatttaaaatttttaggtagtgttcccttagatccaagaattggtaaatgttgtgatagtggaagatgtttctttgatgaatttcctgatagtccagcttcagaggcaattttaaatgttgtcgatgccctaagagatgaaattgaaggttcaaatcagggggaaccaatggaatactaaaatattaattcttttgtaaaattacatttaactatgagtatacaatatacaagtcttttctaaataaataatctaataaatttaatacatcaaaacttttaattacttatcattttgacatcatcagtttcaaattttgattctaaatagtttctttcactttctggtaactctatacagctcagttgtgctgatgtaaactgtaagttttctttaaacgtcacattaatcaatttcttcatcatcagtgtctttgctatcttaacctttgaattactatcttctaatactaatataccattcaaaacgccaccaattttagcctttaattcttcgcatttctctttataactgatatcatcaaaatctaactccttagctatctttgtaacggtgatataatccttataaacttctgcaccagttttgtactcgcttagtgattcaaattcagaaatcaaattatctaatttctcaagttttgtactattatttgcaatgacaatttcaggtgcaacatgttctaataatatcttatgaccagatttgaggttatttgctaatattaattcaagaacacttatgtaatactgttcaagattgttgaattcaaatgatcttgcttcatgtagtatcttcataggtaagtgtaaacgatgatggagttcattcaatctttgattatcttctaggaatcctaacttctttacattattatataataaatcagtaatcaactcattgcttcttttttcattagtgtggtgttccaaaatgaatatactttcttcaatcatatccttcttttctaatttcttggcaaatttttcaacaatttcatcaaaatatacttcattgaaatcaataacggtattgagatatttcataatcaaaaattgtaattcaatatcaaattgtggtaaaacagtactactggagtgaatcatcttaaataataaataataaatttgattattagtagtatcaactaatccattttgttcaaaatagtcaatgaattgttctataatttcatcaaccgatttggtagtatttccatatttaactaataaaaataatattattggccatgataaaccgtctagatgatctatatattcctttccaagaatatctccactcaaaagcttgtaaattttcaaaacaccagatggaatgaatgcaattgtaccattactccactcttttaattgaccacgagctaattcatgtaccattgcatcatttgagtcaatcatagttaacaaaactgcaatatgattgtttttagtatttattgcatactgtatagcatctgaaattttatcagtacaaacgaaatggaatattctctctaatgaatcagttggagattcattgaaatcaagtgcagaactacccatggaattgattttttgtaaaaattgacataaaagttctcttctttttatttcagaaatatgtttgaatttgattgaattagtgtcattatcacatgctctgtatacttgctcactcataaatgattctaagaaatttgaatcatacaaaattgataatagttcccaaatattataatcctcacaacctatcaaaacttaataatggaattctcaaagaaatagaggaatctactttaacttctggtagtccatttgttctgatttcaacttttctggttgaaacttcagatcttaaacatttaccatattcatttgaattattaaattgaagaggaggttcaataatagcttttaccagttttgatgtatctttattaccaaagattaacttatcaacatttttaggatcaactttcatatcgtattttttatctaaatttttgttgaaaacagaaaagaatcccttagataaagctaattgctcatcccaatcatcacttaccgatagttcagctctagatttcaaaaattgtaaattcatcacttccttaacttctggttcatatgctctaacttcaacaagatcttcaataccatcgtaatttctgttaatcagcgctaaagcttttgcatcaacattttcatcatcatccaatgatgagggcacagaagcatccacaagcacatcatcatcttcaccatcatcgtttttattggtgtctaatagtaattcattatttttgatctcactatcatttccttcttcatcttcctcttcatcatttaaaagaaattcaccaggatttactacacctaaatcagtcttttgcctcttccaattgtcaccaggttgaccataacctgcaattttttccaaggcattgatttgcaattcatttcttcttttttcattttgatattcattttcttgttgtttcttccatttggcaataagttcttcatcatgttcatcttcgtccactataccccaaattgaaaaatgttcaacttcaaaaacgtagttaccagttaatggatcaaaacttataaatttcataccgtgaacactcttaagtttttcaatatgtttttcaagaagttcgacatctggatttaatggatcatacttggatggaaatgttttttcaagtgtgataacagcaggaatgttaagtccattaccttgagatggtttctcatattcatcagaataaacttgtaacaatttattaccgataataatcgttttacctaataattgatcccatttaccttcaaaagctgataaatcaaccggatatttgtacattaaattaccatgaccttttctaccaacaatgaaattttcaacatgtgttaattctaatgaagtcttctttgaaagttcttcaatggatggaatacaccaatagtcagcatcagtattttctgattcagaccattctgcagctttttttggtaattgctcactaataggttttgaaaatgttagctcaatattttcatcattaatatcatcacttttcttaactcttttaaattttggttttaatgattcaataataaccggttcggatgtttttttatttgaattattcatatttctgaactgatttggatttttgattttagatagtaacactgcatctgcatcaatctcattatatttcttgaatgtatcattagggtttctgatgattaatcttctatattcacttttagaagctggaagttgaggtgaatctaaacctaacttacttgagtattctttaatttgttcattaatatctttgccagtttttgtgttaacagtgttgtttttatgaatgttgtcatttgtaaataaaccacggaaattttcgattgaatatttacttggtgttttgaaagtttcgacaagtttgcctaccaatgatggttcatttttatgttcattaggtttagaaccagaattagttctttttctttttaactttaaattcatatcatcagatggtgcattggttagagattttggcatttccatatcattgagtttattaagatcattactgaaaagtgatgtcataccttgttgctgttgttgctgttgctgctgttgtgatggctgtaatgtattttgcgcaaaacctaaacctgaagatgcacctccaaatgttggattagttgaactatttccaaacaaggctggtttagtacctgtgttagaattggcgccaaaatttaaacctccactagtagttgaagttgcaggtttgttaaataatccaccgccaattccgcctttaaatgaatttccagttcctaaagccgattgtgaggtagtagagttattaccaaacgtgaatcctgatggctgggttgaagttgttgttgcaggtgttgtattggaattgttattcccaaatccaaaggtattagtttgattgttgtttattcccgttgcagttcccggtgttgcaccaaaggaaaatccacctggcttttggggtgctgatccaaacattgtctaatgatgtatcaacgtttactccttaatgctactggtagtttataaattagaagaaaaaagtagaagaatgtcagtttcctttaaaattgcaataaattttgtgttgtcaacaaaaaactgcgaaaaataaaaaaatttcaggtttcacccttttgaccaatttcttttgtatggtttccatctacattgttatgtatctaaaagtagttaaattttattttaaaatatgaaaaagtacaaaatatctatcggaaaacaaaaataaatataaaaaacaggaaaagtatattaaataaatttttagaatgtattaaaatcaagcttctggcatttttgacataagatcaaaggcaccagtaccagcaagattgagtttacccataacaattcttgcagatggtgatttaagatcttctctatcagagtttaagacagccttagtcaaaaattgacatgtagtttcgtatgacatcttcataaatgatgaagtacatgaatcaataccttgtctattgaatgctaaataagtaccttctcttgtcatataatctgcaattaaatctaaatgtcttgaagaaacactaatagcataagtaccgaaaacacgattaatttcattaacaattgtatttcttgcagcttcaacaccgtaaactttcaaaacagcagcaacatcattggatctaatattattaacattaataaatgaatcatgttcccacatttcttggaaattaacaccttcagtaactaattgacgtacaccttgttcatcggatggatgtaaacaacgtccaatattttttacttcacgaacaacacatttcttacaaacatcttcaacaatattaaccataagtaatttttgagtttcagcagacaattcaagtttgaaatcacaccatgaaccattctcatcatcaaaatcatattcagtaacaaatgtatgtccaacaataacttcatgttgtcttgcttttgctaatttggataagtttctcttacctaaagattccttatccttcttattggtatcaatatccatttcatcatcattatcattttcactatcagaactttcatcatcagaactatcagaatcacttgaagatgcattaacaatatcatcatcacttttttcagcttctttcattgcttctaattcttcatcatcaggatcttcataagaaacagcttgtttggttcgactcttttcatcagaaccttcttcatttgaaattttacttgttgccttagttttagcaactgcaactccaatatctggcatatttgcatttgtttttaatttttgttttctcaattctttagcaataacagattctaattgataaataaattgtgatctaacagtattttctaattcttcctttgtaacatcatattcttcttgataatcagttgaatcaaagaatttaattttaatttgataagatctagttgcattaatacctgcattaacatcagcagttgtttcaataacagagacatcatcaataaattcagagaatttaattttagtaatagatttacagaatgcatcagcagattcatcatcaacatcatctaaaattggtaatgtcatttgaggagttttaatagatgcagaagcagtcataacaatttctcttaaacgtggaatacctaaagtaacattagcagcaccatgaccagcaaaatggaaagtatttaaagtcatttgagttgatggttcaccaacagattgtgatgcaataataccaacagcttcaccaggattaatcaatgatctcatatatttcaattgcattaaagctttaaatttctttgaagttaaaccaccattattctttgcttctttacttgaaacaaataatttttcattttgttcaataaatgaatctaatttttcttcaaatttatcagaaactgaacctaaatatcttgcaggattatataatgaaatagttggatcatatttattatcatcttcaaaatgtggaatatcaccttgttttttactatgttttttagcctttttattataatgaattgcagtttcagcatctaagttttcaacatttgagggactataacgttgtaataatgaattataattatcaacaaaaaatttaaattcataaagatatgattcttttgtaacatcaattgaatcaccaccatacataaattgaatcatagtaccatcagaatttctaacagtattatcgtaattaattgttgcaccttccaattgttttgtaagacaacgttgtaaataaccagaattagcagttttaacagcagtatcaattaaaccttctctacctgccatacaatggaaataatattcttgtggtctaataccagaatagaaacgatttttaacataaccaccagctcttgcatcagtttcaaaaggtttaaaacatggtaaagttttacctgaaaccataacaggtactcttctaccttctaaagcttgttgacctaataaacacataatttgagaaacattaacatttgaacctttagcaccagataatgccatcgcttgcattgaattatatgggaatcttttcattgtaccatttggaacacaagttgaaacaactttacttgtaattgcattaactttagacattgtaacagcatctaaaattgctagtttattatcatctcttaaaatttcttctaatctcttttggaattctttatcattaacttcagtatttgaatctaaattagtaacttcagttgcagcaattctaccagtatcaattgattctttaatgatttcatttctccatttattaccttcatcagttaatcttaaatcatccataccacaagtaaaaccaatcatcataatataagttgtgaataatctacctaaaacagataatgctttacctgcaacttcaggaccataaacttcatgtaaagaatgaataataccatatttagatgaaccatattgagatttatcaagaataccacaaattaattcaccatctttgaaaataacatcattttcctttgaaccttcaccccaataatcatttttaattttattttttgaaattaaattaatacctggagtatctaaaggtttaatattaagtaaaatagttgaaatgacttgtttaccagtccataaaggaattggtttaaatatagttggaggtaaagtaacaattttagaacttgctgaatgaccttcctctggacgaatacatgaataaattaattcttgatatttttctcttgtaaagaaagaatctttattagttaaccaaacacctgcagaaatatgatcttgaattaaacctctaacaggggaaccagaagttggagttaaatattgagaatcagtattagctaaattaaaagcttcagctcttgcattttcattttgagggaaatgcatattcatttcatcaccatcgaaatctgcattataagcaccagtatttgcataatgtaatcttaaagttttttcacctggtaagactctaactttatgacccatcattgaagctttatgtaaagttggttgacgattcattaagacaacatcattatttttaatatgtctatggacttttttattaacaacattaaaacctgtagtcggagtcattaattgtgaagcaattgattttctttgttctaatgacataccaatcaaagaaatcaatgaaccatcttcattttgaacttgagttgcaccaggccatttatctggaccattaataactgcttgtcttaattcagaaacattataatttgtaacaggttcaggataagttaatttaacagcgaaaactggagggacaccaatttcattagtttctaaatttggatcaggtgaaataactgatcttgcatgcataattaactcttttacccatcatatgttttctgaataaaccttctttcttttctaatgcttgtttaataccaggagttggagttttagtattattattttgatttttagttgaatcaataaatccattaacatcattttgtaaagtaacaaaagcattcattaatctattaaaaataattttcttttcatccattgataaatctttagttaaatttgagaattgatcatttaaatctctaataagtaatgaagtatttaaaactttagttaataattcattttgagaattttcatgaatttcttcacctaattttgaaggtaatctaaatctggttgcaggaacgactaatgcattaataaagaacatatcagaagttaatttttgagaagataaaggttttgaatggaataaaacatcaataattgaagattctgcattaaataaagcattcataatatttttaacttcagttgataaaacatattttgaaccagtttttggaggtaaatgaatgaaatcttttttatttttaattgaacctaatttaattctattattagttgattctttatcctttaaagcattttcgaaaattttagagaaaccatctttacggaaagttgaagagaataaaccacaattttcacatttctttttacctaaaacttttgaataaaaatcagtaattaattgttttctagtttcaccaacagttgcagtgaaaacaccagatttagttgttctaccatcttcaattgcattattaattgctttgaaaacaaataattctctcttttcccttaataatcttgatgaagagacagataatttagcatcaggagcagatgaatcaatatcattaaaattattattagtatctttatcatctaaagattcttcagattctaaaatttcatttgaatcaatttttatcatatctaattcagaagcttcaataattaaaccatattgtaacaattttaatttacattcaaatttatgaacatcatttgaatttaatttaaaatgattacaataaagacaagaagttcttaaaaaaatgtaaagttgattaaaaaataaaggattatagacaggaacaggtaattcaatatgaccttgatgaccaggacaataaatatcatttaaaccacaagttgaacaaatatttttcaagaaagcacctaaagctggatcatataaaccaccagatacaggatgacctaaattatcgaaaactgttggattagtaatttgctttgctgataattttctaatttcatcagcagagagaattccaaaatccacatgagtgatttcagaacctacaggtctagcaatatccatagtttgtgttgtgtagataggaaattagggttaaatttaaaaataacaaaatcaatgtaaaataaaattaaaaatcaatgaaaattatcacagtttgaaaaaaaaaaaaataataaaaattttttttaattaaataaatgaaaaaaagtatattacgtaatgtatgctgattatgtaatatgtgataaatgtattacataagcaatatgaatacatggtgtactgattatatcacaaatgattaaactgtatagtatagaaggaggaacactgtgtagaagagagcttaatagaatatgataacattaaatagattataatagacagtataacgtcaatcagataagtaatagaagatatcctctgacatatatccgttatactatcttatcagtaaccaattgtagagactcttcactccgcggcagtgactcaacctcggtaagctttattgtattacgtattcaattagattaatactacgattaaatattaatatttaatctgaaattgttataaattgcagtggcaagtagttcttttcatttttttctctttcttaatactttatttctttttcttcttcttctaaaaggtaaagataatagataatattattatacatcaattaacatattaaaatgaccaatacaactccaactccaactccaacaaagacaatttgtgttttctgtggttcatcatttggtaattcaccagaattttcaaaaggtgcagaacaattaggtaaattaatggctaaaaaaaattatggtttagtttatggtggtggtacaactggtttaatgggttcaattgcaaaatcaattgcaagtgaaaatatttatgttcatggtattataccaaatgctttagtttcaaaagaacgtaattctcaagttgaaattgatttaattaataatgaaattaaagaaaatgttgataatcataaaggtgaaaccccattagatgattcttatggtaaatcaactattgtatctgatatgcatacacgtaaaagaatgatgggtcaagaagctaatgcttttattgcattacctggtggtttcggtacattagaggaattatttgaaattacaacttggtctcaattaggtattcatgaaaaaccaattgttttattaaatttaaatggattttatgatgatttaattacttttattaataaagcaatttcaaatggtttcatatctgaaaataatggtaaaattttacaaattgcttcaacacctgaggaagctttagaaaaaattgaatcttatgtaactcctgttggtagatttaacttaaactggtcaaatcaataaattattaaattaaattcgtataattaataatttataaaattataatatttaaataaataaaaaaattagaatagataaattactccactttaaatcttgcttgcttttaatgggcattgcaattgataaccaggataacaccgttaacatttatattaaattgccttattatctcatgtaaaatttcgcagaaatttcatttttctttgacgagcccccctaattttcatattttactctattaatctttcttcttataaatactatttagtataataagttgtattgtattttgtctatagaattgaaaatctgtcaaagaattaaatataaaataaaataaattaatttttagaaaacttttacataatcaacaccatcaacacattgagcaacagtcatttgatcactaccaattattttattaatttcaatacctaaatcagttgttgatttataaacatcatgttctaaaataatacctctaccttgatctttccatctattaatatcatttaaaatttgctttttagttctttgaggtggtgaactctccatttgccaatcaaatgaatcatgatcccataaaactgcttgcataccaaacattcttgcaattgatctaactctatcatcaattccaccatatggtggtctataccattttggtaaatgattaccagttgcattcattgcccaaattgaccattcaaattgtgcaataatttcttcatttgttaaacttggtaaaaatttatgtgaccatgtatgtgaacctaataaatgaccccttgatttaatttcattataaatttcaggatatttaacaacatttaaacctaatgtgaaaaaagttgatttacttttcaaattttttaataaatttggtgtaaattttgatggtccatcatcaaatgtttgactcaattttggacatgtataaacatcatcatgactaacacatttaaaacaatcaaatgaacattgagttctaataactggacatgtacctgcaggtcttaatggaatattaggaattttattaaaatcaataaaatctaatggtatataaggtggattaatacctggccatttattcaatcctgtaaaacctttaagccattcaggaaatggttgtttagctgctgcattaattaaactatttgtatcattaattgaagaaattgatgtaattgatttatttgtaatttcaattttatcattaggactattattaaatggcataaatatagcatttgtaaaagtaattaatgttattaaaaatgttattaaacaattcattattgctactttctttactattttattgttttattattttattttattttattttatttacaatagtaaggcttttttatcaatttacaggttagcaatgactgaattacagattgtctacttgtttaatcaaccaaataagagaagagttattttacaaagagggagcagataccgcatgttaaatacaacaaaaatttagttttcagcaaaataaggcaatattccaaaataaacagagacacggaagtgagttatttcttttaatgaagggtataattatatttatttagtttatttaatagtttatacgtagttatttatatttgttagaagaaaagctttatgtaaatgaattgtaaatgtatagtatttattttctaatttttaattatcttcaaaccagttgaaggttgtgttttattgttattgttttcttgattttttggaacatcttcctcttctttagataatgaaagtttatttaaatcatctgatgtaaatgataccagattatcagaaactgatcttttatgagatttaatattataaaatgagtcattatttagatcaatatgtggctttttagacattgaaaaaatccctgtatcaaataaaacaggtcgattatcaatggttttggatattataggggagcaaggagttggagatcttgagattccatctgatcttggaattgaagttgaacgagaagatgatctagttgttgacattgaacccgatcttgatcttgatctactagatgatgataaattaaatgagttccctgatattgaattagaatgaggtttaagtataggtctagttgaagttgaagaacccgatgagcatgtcctctttttcgggctctgatgaggtattgttaaaagtgatgaattaacagtatttgaaatgggggtacgttttaaattagtcatagttgtaattgtagcacgtcttgaactttgtaaaggggttggatcagagattgacattgggaacccaattgagatattattattattattattaatattctctttattaccactatttgatgacgaggctgaggaaattgaagaagataaagaaggagatcttggatgataaaaataatttgattgaggaattgaactatctaaagtagatattgacagtgaatgaggagataacaggggagatgttgattcattatttaaagagtttgaatttaataacaattgttttaaatgtttattctcatctcttaaataattgatttcatgcagaagtttcagtacgataccttcttgttccttttcaataagatcaaaagcattatccgaatgggtaacagttgtagattgcattgttaataaatgaagcaaagaaaaagaagaagaagaagaagaaaaggaagaagaagagataactaaactgactaatatcaagaagataaccactataatgcataaaaagataagatcatcactattataattttaaagttttgacacattaccctctccccttagtccctggcgcgataaggaatggcttccccagtggaagtactgggggatcacccaccatccctgccgatgaaatttgatggaaaatgggaaatttcattttctctcaatttctgtggctttctagaactcagggattttctgctggaatctgttaatcgactttgactctttgattctttgactctttgatttgattcatattttctataaataataatatagataatgtcaagtgatacccctgttactgataaaattgataaaaaatcaacattaaaggatgaaccaccaatgtggcttattggttataaccttttatcaggttgtctttggtcatttgttttattaaatgttattgcaactcatatttcatttggttttgatttttatcgtacattccaattaactcattggtggacaacaattattcaatgttttgccgttgtggaaatttataattcagctatgggtattgttcgtagtccaattctaacaacaacaatgcaagttttatcaagacttttagttgttattggagtttggacaattgtaccttatgcaccaaataattatagttatgcatatttaacagttcatattgcttggtcattatctgaagttattcgttattattattatgctcaacatttaatttcacaacaaactcaaattaaaggtcaaactccaaataaagtttcaccattacttttatggttacgttataatgcatttattattttatatccattaggtattacatctgaattaattatgatttggtcagctgcattccattcaaaatcttcaatctatggtttattcttacttatatcaatggctgcatacatacctggtgctccagtgttattctcccatatgcttgttcaacgtaagaaattcctcggaaataaaatcactaagaaaacagagtagtcgcgtctgcgtctctatataaatttttttatttactagtagaaattcataatttttttgtgtaatgaacgcttgagctttattaatagggaacttttcactctgctggaaggtctaactaaaagaaggaaagaagtatactttaattttaagcaacatactcacatcttaatacaatgttcagaagactatataccactgctgttaaagatacaaaatttttacaaccgttaaaatttgaagatagtctatatgcaactttaaaaattcataatcgttcatatcttgtaacaaagggtgatatcgttaatttaccattttgtttacatactgcaaatgttggtgatagtttaaaatttacaaaaattgatactattggttctcgtaattatacttataatattaatgatggtattgataatgatttagtaagtgtatctgcaactgttattgaaaaaactaaaataccaatgactataaaggaagttacaaagagaagaaatagacatacaaaacatattcattcaaaacatgatattacagttcttagagttgatgacgttaaaatactttaaatctatatatggattttaaataaataagtttatcatactatatcatactataaataaccatttcatttgtctctccaccccattatccattatgcttgtataaatttgtaaatatatatcaatattaaaaacataatcttttataaagttaatctaatatgtgctttaaatcacaccaatgatgatttagtagcatgaatcccgcaatttttcatgatttcattattttctacaatatagaagatctatttttaaaacattaataaattctatttttataatcttatataccgagccatctatatacaaacaactaatcattacgtgggtattgataataatataagaaattttgaatttcaattatccccaaaaataaacaatgtcagaggatattaaaaatcaatcattaagagttgacacatcattgttgaatactcaacaaataccaaaattaataacaccaaattctccatcatctcctcaaaaatcttttaaatcatctaaatcttcaaattcaatatcttcttcatcatctcttcaaataatttgaaaaaacataaaaataagaataagaaaagttcaagaaatccattctctcacggtagtcctctatatggtgaagtatcaaataaaatgagtttatttttccatgcagctcataattcggataaaaatagcaatcaattaaaatcaccagataaaaatagattatcaacttactcaacaaatacaattactgaaaatgatatgaataaagaaaatgaagttgaaattgaaaacgaaaatgattggaatgatggtatgtttgatcatttctcatttgagaaaacttcaacaaataataattcaaatagaatagtttcagatccaatacattctaatgatatagttggtctgggattctccgaaaagaaaataaatttctcaaattctttaccaattggtggtggttctacacataagacacaaattactcaacttgaaactgattctaaaacttcattaaatgataaaaatcaaccagctttatcttcaaatgacaattatctcaaccaccataaaaagaatttatcatctgaatcaagtttggaattctccattgaatagaaattctaatccattacctagttataaaaatcctagtcctatgattactcaaaatgtgagtcgaagtaatagtgttcattcaagaatcagtacaactagtgccaatttactacaaagggccaattctattacatattcccaatcatcagcttcaacatcttctaaaactcataaaagatcatcatctaaaaattctaatcatgatattataactactcctaaatcttttttcaaatttttcagttccaaaaaacacgaacccaatcaacctaaacatcattcttattcatattctcaaagttcagattcttctcaaggattatcaccagtgataagctcaactgtaaatttgaaattctcagatttatctaactctcctgtaagtacttatagtagttctagcaaatttcaacaaaagaataaaaaacgtttaagtttgggagagggagaaaatcaagaatttaacaatacatctactgagtatttcaacaaatgatacaataacaagcaaatcatcaccaactgttagaaattatagcacagaaatacaatatggacagctatcacctgaattaccattgaatcatccaaataaatcatccaatgaatcaatattttcagtgaaaactacaccaaatcctaaaagaaattcaatatacagtaactctaattttactacgaacaataatcccatttcatcacaatctgcaaatgcaacaccaactgcaacttcagttccacaattaaccaggttttctacaaatacatcatcaacaacaactccagtatctaacaaaagcagacaacaatctacaacatcagtatctagaacaagttcaatatcagcagcatcagttaaaacaacaaattcttcaatgtcagctaatccaacaactaaggtaagatcatttgttaaattaggttcaaaatcaatgaaatattcaattaataatcgtaataaaaaatcaagttcttgggatgaatgggatggtcatagtggtagttttgagaaaattggtcctgttggtaggaaaccaagtccaccaggtcaaactattcctgttgttactacatcaaatttacattcatcgactaatatcacaccattatctgtttctaattcagtgtctaccattactggaaataatccaactactccagtcgtggaatcaaatagtgtgcctttaccctctgagttaaaaagtgttaataatgatgtaaaggaattaacgaatgaaaaaattattcaaagtgataataaacttccattactttccaataaaaatgggtctgaatttgtattaaaggagccaataccttctaaaggttcgaagaataaaacaacagaacgtaatatcatgcctttgaaactacctccaatgaatacagaaggatttgaaaaattagataaaattaatgttagtcaaaaattcttaccaaaagcaaatgaaaacacagttaaaatattaattactacaaattttgttgattataaacttattgatatatctagtttcccaagtttatccaaatttatgacttttgtatcaaatatgttcagaataaagggtgaagcgcaatttttcattaccgaaataggtttaacaaaggataaattaggtaagaaattggataggaaagttttacagttaatatgggactcgattagcaataactcattaaatatttcattagtattttacattactgcagatgaaagacttaaaactccagatcttaattctggatctcctaataaaaatgctaataaagttgagtatttggcacctccaatgtatcatcataatgatcgtacagaggagaattcattgtacacaacttcgtcatatactaattccatcaactcagattcaagctttgatagatacttacctacacctcaacatctaatttctgtacgtaaagatcctaatgttgattattggaatgttaaagatactattgaaagaaaaccatctttgaaaagagctccctccgtcactcattcttcaatctctggtgatggaaacacaatttcgtccatttcaagtttatcaaggaagactagcaaactgagtattaattcaaatcaagcaacaccaccatcatcatacgctcagccgaatacatcagcatcatcaaatctacactctacaacttctacatctactccaccagatgcttatgcgaataaacttaaatcatcctttaaagtcatccaacctaaactgcctcacgttgattttgataataaacgttctactccattcaacacatctaatacattagttgcatcacgtcatccacctccaccaccacaaatcaccaccatgacaccaccgacaccaccaattccttcaaatattactcgtacatcaggttctgtctcttcatcagggtcaacatctagtggcggatcaaatgctgttccaacacagaccacaccatcttcaactgcacattcattaaggaatactggaatatcaagatcaagtagaacattaaagagaggtcaaatgagtattagatcattgaatagatcaaacacccaaacaagtgttttcagtaattttagttcatcaagtggggttagtgtcaatgttgatccattttcagaaaataaaatatcatttgctaaatttgagagcgatgaagattcagaagttacaagtgatgaagatgttgatagtgattgtgatgagtttggattatttgctaagaaaccgaaaagtacaggctctaaacattcaaatgattctgaaaagagtgacgaaaaagatgttattacggtagatttgaagggaaagctgaaaaatagtgaagatgaagaagatgaggaagatgacgataatactgaaacttttggattgtttgttaaaaaaccaaaaataaataaattcattgttcatgatacgagtgatgaagaattagatgacgtttctgatcttttccataaaatccctagatcaattgccggtactaagttgaatgaagttgttatttctaatatgagtaaacagatctttacaaataataacggaagtgaacatgtggtaactgatggaatatccgcaacacccaaaaacccaatcgatgatctggatagtattaacaaaagtatcgaaaccaagacgaacaatacaacttcagtagtttcaccaactatttcaaacgatgattcattagctagttcattagatattagaccacctgctgaagttttatatgataatttagaagttttttttccaaaggcagatttagatagtttagtgattgatgattccagtgacaataaacgtggtatcggaagaatgaaaagtataagaattattgcacaagaggcaagtagaagaaaaagttatagaacaccaattgctgcaattaaagaatcgcagaaacttccaaagtccaaaaatcaatttatgaattctaatagtttattgcataaaagtaatagctccttattgagaaggaaaagtacgaaaatgtggggacaaaaagttgttgaagtgaagttagatcacaaaaataagacagttattcctagacgggtcaaaaatggtgaaatcgaagagtttgcatggataaaaggtgaattgattggaattggtaaatttggtcgtgtttatgttgctatgaatttaacaactggtgatttaatagccgttaagcaaatgaatatcaaccaaaaatttttgaacgaaaaggaaacagacaagctagttgatacttttaaggcggaagttgattcattaaaagatttagatcatgctaatatcgttcaatatttaggatttgaaattaaggacaatacatatagtatatttttagattatgtttcaggtggttcaattggtcatttgttaagaaagtatggtagatttgaagaatctgttgttagatatttgacaagtcaagcattggaaggtttaaattatatccacttgaaaggtatcttacatcgtgatttgaaggctgataacttattacttgaaacaaatggtattttgaagatcagtgactttggtatcagcaaaagagctaaagatatctatacatcacagtccaaattgaatttccaaggtactatcttctggatggctcccgaaattgtgaatgatacaaatggtgttggatataatgctaaagttgatatttgggcattaggatgtgttgttttagaaatgtttacaggtgaaagaccatggagcaaatatgaaaatgaaggtgttctatataaaattggtaaagaaaaggaagctccacctattaagaaggaaattagaaaagaaatgtctagagaagctaaagatttccttaaaaaatgttttgaaattgaaccatctagacgtccaactgcacaaacattaattacaaacccattttgtcaaattgatgaaaactttgagttccatactactaaacttggaagtatgatttatagagttgaagaaaaggagaagagtagtttgaacaagagaatgcacagtatggcaaggaaactgtaagaatagagtagaaaagaaggctgtgcattttagaatatttttttttttcatgcaaattttttttcttagtattatcatttcaatcacacagttttaatctctaaccaagtctatatttttataaaaacacatttatagaattgtaatacccataaaggaaatatcatataacgatggtgaagaaatcgaaaaccatttccaaaaaggaaaagtcaaccagacgtgagaaagagaataaaaaacttgatgaactaaaacagagaattgaagatttaacaccagaagaatataaaacttacacaaactttaatgaacttccattaactgccgacttattaaaaggtcttgaacgttctgggttcgttaaacttaccgaaatccaaaaacttgcaatacctgaatgtttgaaaagtcatgatatattagcagctgcgaaaactggatctggtaagacactttcatttttgattccagtagttgaaaaactaatcttcgaaagttggtctgacatggatggattaggtgcattgataattactccaactagagaacttgcagttcaaatttatgaggttttacttaaaattggtaagtttacacaattaagtgcaggtttagttatcggtggtaaagattatgcattcgaaaaagatcgtgttggacgtgttaatattttaattggtactccaggaagattattacaacatatggatgaaagtgctaccttacaaacaaataatttacaaatgttggttcttgatgaagcagatagaattttagatatgggttttagaaaaactttagatgctattttaggacaactacctgcaactagacaaacattattattttcagctacacaaaccaaaagtgtcggtgatttagctagattatcaatgatcgaaccaaagtatattaatgcaaatcttgccaatggtggtaagggtggtgaagaaatgtcattacctgaaagtttagaacaaagttacgttgttgttccattaaatgaaaaattgagtttactttggagttttattaaatcacatttaaaagctaaaatattagtttttgtcagttcatcaaaacaagttcactttatctatgaaattttcagaaagttacaacctggtattccattgatgaaattacatggtcgtcaaaagcaaaaggctagattagaaacttccgttaaatttacccagagtaaaaactgttgtttatttgcaactgatgttgttgctcgtggtttagatttccctgctattgattgggtcattcaactagattgtcctgaagatgttccaacatatatacatcgtgttggacgttgtgcacgttttggacgtcaaggtaagtctatgttaatgttaatgccaagtgaagaagaaggttttgtatctcagttatcatccaaaaacgtagaagtcaagaagttaaatatcaaaggttcaaaaaagaagaatattcaaccacaaattcaaagtttatgttttaatagtgctgagttgaaatatctaggtcaaaaagcttttatatcatattgtaagagtgtcatcatccaaaagaataaagcagtttttaaaattgatgaacttccattagatttatttgcttcaagtttgggtttaccaggtatgcctaaattaaaattaccaaagaaagcaacagacttaaccgatgaagcaagattgaaattgaaagaaaagaaaaatgaaaatagaaaactcaagtctttggataatgctaacgacaacggtgaaatcgaagataaggataaaaaggttagaacgaaatatgataaaatgtttgaaagaaagaatcaagatgttttgagtgaacattatatgaaacttaatgctgaattgaaaggtgatgaagaaagtgaagacgatgatgatttcctgaaggttaagagaagagtcgatgaagttaagaattcagaattaccagaacttgaaataaatacatcaaaacgtgcaatgaaaaaggcgttatctagaaagcttactgcaatgggaagcgaaaaaggtgctaaacttgtttttgatgatgaaggtaaatcacacccagtttatgaattggatgatgaagagacatttctcaaacaagaaccagaaaaggtcaagagtgaattcttgttagctgaaagggagaagatgacaatgcaagatgaagtcgataaaggagttgcgaaagacaaacgagctgaaaagaaacgtaagagaaaggaacttgaaagacacatgaatggtgattactccgatgatagtgaagatgaaggtccatttgttgcaactcttggaactccaaaaaatagtgatgacgaaaacgatgaagaaattccagacttggtcaatgatcttgaagttagtgatagtgaaagtgcagaagatggtccagataagaagaaacaaaagaaatggtttgaatcagataaatacaaagaaagagatcaagaagatgaaggtattcttgaaattgaacaacctgaaactattgatgatttggaagcattgactttgaaattaatggagtaaaaaaactacctgtatacttagtaaaccctatttataaattaatacgcaatttatttatttactatatcattcaaaatttagaaactacagtaaatgttattggtgatattatatgagtgtatacaaacagccggtgagaatatttaattaatacattaatgtttgattaaatcaaacataagaactgtaaccaggagcaaagtattgattatttcttctaacatagtatttctttgcttcatcagcaagccagacagtacaactgattgttattaaatataatatatctgaaaacaaaagcgcttctgtttggaaaatctcttgaaagaatggaacgtaaatggcacataattgaccaatcaaagaaccaccaacagcataattaaacattttgtttctcattcccatttcaaataccgattttgtacttgaacgacatgataatgcattaaacatatcaaataaaacaaaacaagtaaaagtcattgttgtatctctacgagtgattgaatctcccatttcacgaacataaacaaacattgtacctataatgacaaatattgaacttgataaaactctatgaatgacttgcatagtcaaaattttatcatttctctttctaggtggtttgttcataacttcttcatcaaccggttcaacacccaatgattgcgcaggtggaccatccataatgatattaatccataaaatttgcattgcattaagaggatttggtaagttaaataaagttgcaagggcaactaatgaaagtgctgcaactgaagtagaaagttggaaagtaagaaaactttgaatattgttgaagatacctttaccttctttaattgcttgaagaattgtactaaaatcatcatctgttaaaaccatatcagctgcttccttagcaacatcagtaccattcatacccatcgcaataccgatatcagctaattttaaagcaggtgcatcgttaacaccatcaccagtcattgcaacaatatcacctctcatttgaagtgctttgacaattttaaccttatgttcaggattagttctagcaaaaattgaaacgtttgaaattgcgtcagcaagttgaatttcattcatttcccctaatttatcaccagtcagtatacagttaggacctacaggcataccaatttgttgagcaatattatacgcagttatttcggaatcaccagtaatcataataatatgaacaccgccatgcatcaatgattgaattgatgatctaatttgaggtcttggtggatcattcatacccattataccacaaaagattaaatcctttggttcatcttcaaatactttattggattttgcaaatgataaaactcttaaaccatctttagcaaataaatcaactgagttattaatcgattgaatgatttcaggagttaatttattaaccttaccatttttatcataataactcttacaaagtgacaatattttttcgtttgcacctttaacaaaagtttcaacattggtattattgtgagaaccacatgaaacagccataaatttctttgaagatgagaatggtaattcgtttactcttacaaaattttctctaacgtcatataagccaaatttagacaatgattcaattattgcaatatcagttggattaccttggaatttctccttttcaactgaatacttggaattattacataagcaacctgtattcaatagtatcttaacatcatttgaaatatctttaatatgattggttgtgttcccagtatggtaagaatcatgtaagctatcttctgggaaaatcataggattatcattcattgaaacagtccaaattttattaacagtcatgtgattttgagttaaagtaccagttttatcagagcagataacgttaacggaacctaaagtttcaacagatggtaatctttttacaattgctctctttctagccattcttaaaacacccaaagcaagtgtaacagttacaataattggtaaaccttcaggaatagcggcaactgccaatgagacagaaacttggaaaacatctaaccaagatctaccttggaaaataccgattaaaccaatgacaccaataacagcaaaactgaaagcagatagttgaccacctaatttatccattgcattttgtaaaggagttttaggtttttcaatattagacattaaatcgaaaactgaaccaaatgcagtatcctttgcagtagcaacgactatacctgtaccatgaccttctctaactaaagtacccatgaatgcaatatttgaacgttcattcaatgaagtatttgagctcataattgtttcagtattctttttagaaggttttgtttcacctgttaaattactttcatcaattgtcaaatgaacagcttcagttaaacgaatatcagcaggaatacgatcaccaacactgaaatgaattaaatcaccagggactaaatgattagctaaaactgtttcagttgaattgttacgtgttaaatgtgccatttcaggaactaatttattaagtgcttcaagtgatttttcagatctatattcttgaacaaaaccaacagtaacgacaagtaaaattgcagcagtaattgagattgcatcatctatattacccattaagaaagaaacaacagcggatccaatcaaaagcataatcattggatcagaataaaatgtttcaaggaatttccataataaagattcttcctcatcagaatctaattcattaagaccgtgtttattacgacgttcaataatatcggaaggattaaccaaaccacttttcagattagtatctaattcattaacaatatcatcaattgacattgtacaatattttgaagatagtgaagttttcattctctcagtagaggaggctgaagttataatatctttctccatatcgagaaatgatttttccttgaattcttcaatagaagaagatcctccactaccactgatgaacgcactgaacggattgtccgacatgtttgtttataccagagatgttaaatgagaaccgaaatttagactaaatcagaatctgaaagaaaacaatcagaatttaataactaaattacagttcaagcatgttatgacacgaataataagcgactgtaagaaaaaaaaaactgaatatttgcaagctgtcaataccgtctcttaatgagttaattactgcttttaattactgctttctaattactatatatgatacaacttataatttacaatatacaattactctatatatctctaatcccttgcaatgctctgataattgcgtctttacgtttcatactgctttgaagttctgaaatttcatctcgaagttcatcaataatatcatcattaggtaatatcgtgtttgatacttgatgtgatgatgatctcttatttctttcaacttcaccctccgatatccgtaatctattctctaaatgactaatgtatgattccatttcattaacacgtaaatcatattgcttaacattatctttgattttagctatgatttcattacatctatttcgtgttacacgatcaccaatctcttcacacactatatagtttaattcatcaataccatctacattagattgtgaaacaagtaaacgtttctccatttgcaacctcttcaaatgctctacttgttcattaagtatactattctctgcaacaagttcataatacaattcatctccccctgctggaggtggtgttaatattgttgtattttgtaactctaaaatttcatttttcagtatttcattctcttgaattaacttattaacatcataatcactagtattctttttgatatttaattgtatgttttttgctcttaaaccaaatctaagagtattagtagtttcaccaatgaaattaatacctaattgcattgtacaaagaattgaaattgcagattgtccatttaatgaaggttgtaaaaatcttgttaatttagaatctctatagggtatatgtgacatatttgttgtattttctgataatttagttataactgtacctaatgctaataatgacttattaatatatgcaccctctttacgacgatcgatatgggtagttgcacgttcactacctgctaaatcacaaaaattcaaaactgatgatacctgattaccattattattaactataaacacctttattttaacaatgaaatgcgatcttgatgatgtgtgattataatctgtagaatccatactacgcaaagattctcctctatcaattaattctagcagttgattcactgattcaactctaatttcacttaatcctttaactttaacaccatatttcttatcatcaactattttcaaatctgtattatcacttactaataaatcacgaattttttcattatatatctctaaaattgaacattctacaacattaacattttcaaataacacatcaattgaacgttctaagagaccacgcattgaatatgttttacccgacccagtcataccatatgcaaatatagtaccattatatccttgtaaacatttctctaatatagggaatgcaacaatttgataaacatcatcattattatcattaacatcgaaaacatgatcgtattggaaggtacctaattctgaatgttctacaatcccacgatttgaatcaattatccacgatgttggtatatcttcatatttaggccttatggaaacatgtatatgagatgaatgtactggtgaatcttgtgaaattgtagaagatgatgataataacgataatcgagatgatgaacgggaaagacgtggagattgaggcattgtcagtgatgaaaccctccttgttcgagaggaacatcgtgatatatttcgagaaggtatatctgacatagagtcagtcctcttaggtgtgttcatattgcttgttatgttatctagctttgttgttgacttttcgataaagccaagtggatcgatgatctacccagtgaaaaaaaaaaataatacttagctaacgtaactctattaatatttatactatagtctatttacttctatacttattggtatttacatttctgcacatccatcatggtgaacacgctactggctatatttcttactagaacatagttagctatcatttgtgaatcaatgtatccaatacaggtacatttcccatcaactagattaaatgatccattggtaaccaaccctattaaatcatgcaattgaggtagttgtgtagaataattatcagtagtaaccattttaagattttgtccactaatacctgtagattcaccagttgaaattgttttccacttttcttcacaccccactggtacagaatatattctagcatttggtttgatattacccatgccaacacaacttaatataacaggactaatttgtaatggtggcatgtctataatattgaatttaaaaggattagaataattttgtgggataattgtaattggtttgtgttttaaaattagctgttgttgattattatcccttaattgttgttcagcacttgaaattgctgaaacaattggttgaatgtttgaaagtgactttatttggaaatctccatcaatggtttgtaaaggtagtggggtcttgttatctgtcactttggtaaccaatcttaagacttgtaatcctctccaatccaatccaaacggtgacaataattcacccttttcaccattagaaattttaactttagtataattaactcttttagatacaggccttttgttccatttcttttgattttcagttctctctaattcacattgaacaaaaccagatggtgtaaataccatatctgaccaagatatcagttttctttcatactgtagttgttcatattgttttaaaccaccaaattgaacatgtggtacatgcactaatgtataccagaacggtaaaatccaaaaccatggcatttgaacagtccaattttggcctcttttaataatcatgatgggaattttaggatctttggatgttaccggaattgattcaccaggataattgtatcttcttttacctagctgtttcaatgattgctgatttttatatgattcattacgattttcagaagaaagtaaatcattgtttaactgtggttgttttttaagagaaattagcaaatctagttgttcatcatatgataacttagggtttgttggcaatattggttttgttgaatgtcttggatcagaaactgaaaatgtgaatactgtgttaggaattgtcgttaagtcactaattttatgaaggttcataaaatctgagtttggtaagtatggataaattattgattgaagtgcagttaaagattttgggccagttagctcaattgaacctaatgagtatttacaatcatcaatcgatatagttgactcagagaagtccttaatgatttgttctaagaaagagtcatatattgatggatgtaatgtcaacagaagctgtaattgatcttgtgattgaatagagacaatcaaaacctttccaataggttctgtagagttgtaaataaatcctgaccaagatttgttggtattttgagtaatatcaaacttattatcagtaattattttcatatagttggaaagttcatcgattttatcaagtggacagttgacaagccaatgaactatagtatgaatgtatcaaaagcaactgcacctctaatacgggcagcacgactagtatttctataacatttttgagttggacttaaaggtatattccaaccccaacgtttacacatatgtgctcttttagcatgccatatatgagtagccagccatttaaattttctttgacgtgttgcatatctgacttgatgtaaatgtgaaatagtcgcaggtttatctgttgatgtattatctatttgatcatttaattcaaccaaatgtttctttaatgcttttattttatcacgtaaaccggaaccttgagtagatacccatgtagaatcaggtaacttccctttaagtttccatttacttgcataattaagtaattttatcctacgtaataatgcccatctcttcctacctctacctagttttggattaacaggtttacccgttgaaccaacaccttttgtagtacttactacagcaactaatggatttttagtaacaatccccatttcacgcaatgctttctttctcattctctttggtatacgacgaacattatgagaagcggttctacgacgtaatgaacgtggcaatgattggaaaacacgtgaagcacctgaagttttcgaactaaccattgcactttccaaagctctaacttcaaaatctcttgctgctagtaattccggaactactaatctactctgttgtggtaattgttgattttgttgattgcttatacctttggcaagacttttccttagttgtgcagccgttggaggaggaccctttgagggagccaaaaacgccggatcattgatttgagttctgataactctagaattgtagacacgggacttcttagcagttggatccattactgtgataatatattcatgcacaacctaagacagtgatcagagtcaacagtggtgtcagaaagggtttcccaaagaggaaactggggaaaaagaaaattaattttttttcaggaatttcccacagaaaaaaaaaaagttgacgaaaaaaaaaatatttcaccaataaacgttattgttacactatccaatgacttttagttacgtttagccttctttttaaaagacttgtttcgtaatgactatatcacttaacgctacaccggaaaccgatagaggctccttggaacagggcggaactacacatatgagtaacgacactattcagttcaaacattacgcaagagatgcaccaaattacccaaccccatcacatacaccaacaagtaccaaaaatgaacaaagtgaaaatgaacacgagaattatatcgaaaatgatgagaataagagtccaaaatcaactaaagtatcaaaggatataacttcaaaggcaccaagggattttacaccaaaagaatttaatacaaaagattcaaatagtaataatgttgatgagaacggttacccatttttaagtagagaatttgttgttcgacgaatctcagaaggtgaaactggtcgtttaaaggaagaacttaaatgtgaagcttgtggtaaaggttataaacatattacattcacttgctaaacatttatgggaacatacagctgaatggcaatctactaaaaggttattaatttcaaaacatcaacaagctcaacttcttgaagctgcaagtatcttatgtagtttcaatgaaaatgataataataacaacaatactaatgctaataataataataataataataataataataataataataataataataatacaaatgcagtcgcaaatggaactactacagcacctaataactatcttaacaatacccatgcttcacttacagcacgacgcaaaagtcgttcagatggtccatcaaagacaggtaagtttggtggtaaacgtcgtacaactagcataaatcattcaaatcgtcggtttagtgaagttgaatttcttcgacgtggtagtacatcaattttaccaccaagtgatataagagcacgttctggttcaattgttgaaggtgattcagtattatatgattctgaagatgaataaatttaatttattctatttcattagctatcttaatattgtgtgtatatttctaaatattataaattgagtttattatattatattaatcatcaacgtaattaatttagttaaaagtagtggattcttttttttgtttctataagtaatttattggtttctatgatatacaaagtgtttaatatgaatttagttatacaagtaaaatgactctaattttctctccattgatgaccacaattagtacatttatagaaagttgtcataggttcatcagctgaacgaatttgaagttggaagaaataagctctatcattaccacaactttcaacaggacattgagcagcagtttgatccacattatcccaagcacctgcacctccaagaacatcatctacttgtttacgaggtaatgattttctttcaaacatttgtagtccggcaattggaaattcatatggacaagttggacagacaaaagcatttgaagctgaagttgaagaagctgaaacaacaagcatgttactgcaatagggacaaaacgttagcattgtaatgatatatctatatagcttctatactatactctctactgtatccttttgtattaatacacctcttattgaaagattaaaagtaaagagagaaaaatatttttttgtgaggaagttcctgcagtggtagttttcatgttgttgatgaaatattattattaactaatataccggttagttgctgatacacagtgtttgttaataaatctgtttctcttttaattttctgacttacaagatatcctttatagaagaatggctggtaaacctacacagactcctccggcttttgcctttgatcttgccaactgggaagatactcccgatttatcctttctcgtagatggtacaacagatcattctaatactccaaatcagaatatcgattattcatcacaattacaacactaccaaaacttacttatggaaactcaaaacttgttgtctatgaaaaaaaacaaaccgaataaacaacaatcaaatgatacaaatattgctcaacctcaacaaccattgtcccaacaacaacaacactctcagcaccaatctcaacaatcatcattgtctttaccacaacaacaccaacaactacaaaatgagttattttctcaacaagaaccagatcttttacaacttcaaaactttcaattacagaatcttcaaaatttgcagaatttacaaaatctacaaaacttgcaaaatctacaaaacttctctaatattccaaatataaataatatccctagtaatgtacaaagctctcaaacatcaccaaatgtgccaaataatgagaatattggttttcccaatttacaaactctccaaacattacaaaaactacaatcactatcgagtaatcctgttgcaattcaatcattcataaataattctttgattaatcaatcctacttctgataatatgaacatcagcacgtctaatacacctgtaacaacgcccaatccaacagtatctcaactacaaagcttcatcccaacagttacaacaatcacaatcttctgccaaaaagtctgaaccacctcaacccagaactaaaattagaccatgtgatcattgcagacgtcgcaaaactaaatgtaccatgataccagactctcatatttgtaaatcctgtcaagctaaaaatctgaaatgtacatttaatgaaactacagtgctcaaaaggatcaataaattcacttgattttgataataagagaatgaagtttgaagatccaacaattgaaccgcctccaaatattcctgtacgtaacgtacctccaataaaagattattccacaatgcaaggtaattcacttttgaagaagacattaagcttacaatttccacgctcatctttctatattggtccaacttccatatatgatccattattcttgaataaagttgctcttgataaaattgatcaatttcaaattgataaatcaaaatctataaggaaagttgctaattctgttcaattcttacttcgtgatgattttagtgaattattatatgaacaagctgaaagagattcagacattgttgaaaaatatattgcgccacatggacaaacattaattgatctctatttcaaatctttccatccgtctttcccaatcttacataaaaaaatattcattgaaaaatataatagaacacaccgtgagtttggtgctccattgttagcagcagtttatcttttagcaatacaatggtgggattatgaaccaaaattatgtaaattaccaaaacctgatgttttatcacttcatagatttgcaatgagaacttttgttgatattacacaacgccctaaattaagtgcagttcaagcaggtttattattactacaatgtcaattaattattgataaaaacccacaattatcagcaaatagttcaaatgtaaattcaacggctaaaaaaagtaaaaaagaaatcaaaaaggaaaaaatgacattagaaagagaaattgaaacacaaactcaattatcgaatcataacaattggttattatgtacacaagttgttgcattagctgaagaattagggttaggtttggattgttcaacttggagattacctaaatgggaaagaggattaagacgcagacttgcatgggctgtttatgttcaagataagtggtcttcattagttgaatcaagaccttctcatatcaatgaaaatgtaaattggattgttaaaccacttacagacgaagatttccctgaaaagaatacctctaataatagtaataataataacagttccgaatctgcgttaaatacagatttgtcattcattgatattgaatcaggtaaagaagctttcaaacatacagtatcattaagtattatattaagtgaaatccaatctcagttatatacaccatttgcgatgcaaaatatctacttaattgatgatgttttacgaattgccaaaccactacaattaaaattaagaacatggtatcattcattacctaagatattacaaatgaatgcatctaatgagctaacaaataacgaaaattcaaatataaaatcatttcaagcgaatggtaatttacaattatcatattttgcagctgaaatcactcttcatagaagaataatttctgtgttgtataatcaacaacaaagaagtgatattactgcagcatcaccagcaaattcaaatagtaatacaccaatggggtcaccagcctcatcaacaactgcaagtgcatcaaattctcaatctatgttaccaccacctgcaccacaattggttaaagtttgtagaaatgcagcaaaaacaagattaacagcagcaatttcatttattagagaattaacagttgatcatatgcacaatttctggcatagtagtgcacctagaaatttagcattaattggtatttttgcaacattattatatgttactagttcagatgcggatgaagcatcagtttatcgtgaatatttaatggattataaatggattttaaagatgaatatttcaaatttcaatattgctaaagaagcattattattaattgatggtgttgtccataacataccaggcttattgaatgattatgatagtcaacttgatacattgaatgaatttatggttggaaaaataaattcaaatattgatcaaactgttaatcaatcacaaaatcaaaatcaaaatcaaaatcaaactcaaaatcaaccacagaatataaacacaaataatataaataaaaattataattatgatatttccaatggtgttagcccaagaaccattgctagtcctggtaccaataagttcaaacttcctaataataccatacctaataattcaccatatccatcatcaccattaaacagtatgacaaatagtaatgtaggtacatcaatacctggaaaatctgggccaaaatcaagacctaaatctccaatgattatgatgaaagatgcaaagactccaagtgttgttaattctccaatgggtacaccaactccaacattactttcacagacacaatctcaaccacaaccatcagcagaatctcaatcacaaaataacgataaagatgagaaagctaaggaagaagataaaaagtcggagaaatcatcacctaagaaagcactggaaatgtttcaatacgataatcagcaaagtttgatgaatatggcatctatgtttggaataagttctgaagttgaaaaccagatactaaatcataataacaataataataaaaataataccaccaacaataacaatattaataacaatactaataacaatactaataccactatcaacactaataacaccactaccgatggtaatgacagcagtgacaatagcaaaaatggtagcaataaccaagaaactggtaaataactgttaaataacactgtataaatagctaactaatgtaaatacttacgtaatacattatataatttaaaaatttctttttttttctatggcaccattaataacgaacatcctccccaggggtataataatataattgcaaagaagtttaattgtgtgtcttgccaagaaatgatgcatagtagttgctctttttcgttaaattacattattctttcttttaatttgtaacaatgtccgttaatgacattgggaagttattatttgctggctttgaaggtgtcgaattctcagaggatggtcaagccgcaaaacttatacgtgatcaccgagttcactgttttttaattaagagacataactatgttaacattcaacaattaaaaactttactaaatgatttacaagcatttgcatataattgtaattttgattcaccactagctctatctattgatattgatttatatgatcatatgcgtgatcaaaatcttaaagaattaacagtctttcctccatctcttgcatcatctgcaacaggaaatttcacactttgttacaatattggtaaagcagtaggtttagaatttaaagctattggttttaatatgatgataggaccaattttagatattttctataaagtctcaaatagtaaaaagggtattaatacccttggtgctactgtagacgaagtttccaaatatgctgtagcttttggatgtggtatcaaatctgttggtttattaacatcgggttgttcatttccaggtatgggtaatacatcaattgattcagttacaaatgatttaatattagttgaagattataatcaaattgaaaataaaaatatcttaccatttaaggcaatgatcgaagttgatgctttagattcaatcttggttacttcagcatttgctccaaatgctttatacgatgatttaagttgttgtttgaatcccaaaattgttgataccttactaagagagaaattagattttgataaactagttattggtggttgtcttgaaacttatgaaattatattaaactatggtattggacaagcggctgctttatccattctttatgcacattgtgatatgatcacagtttgtaaatcttataaacatcaattagaggctttagaattcttacaaaaatcttttgagcataataataatcaagctattctaataactgcattaagaagaattgatgaatttcttaataaaataacttggtttgattcaaaagttgagattacaccggatttaaagcagaatcacgagaagctgtccaatgatgcatatagaaattcaatctctttagttagagacttatatggtatggttccagcttggaagtattttaaacaatattcattcaattttaatccaatcgatgaacttgcaccaaatgataaattgattacaatacccaatttggataaaatgatacgatcagataacataatgacattattaacgccaacaaatttaccagtttacaaacagctagttaggaatttaatagaatatggtaaagattgtaattgtattgttaatcattttgtttacaataattatgaaataactaaagaaataaggttggcactagaaaattctatttacatcgtcgttatacaaacaaatgaacatgaaatcaaaataattaaagaaatttcaagacttttatcaatgttaagtaaaaaattaatgattgtatcagttaactcaccttattactttcttgataatgatacaattgcgggtactttcatatcaacttatgataactcaccaaaggctctaaattatttagcacagttaatttttggtaaattccgtgcaactggtagagttcccggattttacggtaagttaaactcacgtgaagaagttgttatgggattatccaacagtttagatagttctgagtggcaatttgactttttattgaataagccagcaattgcaaaaccattatccaagttatccactccaactaatttacaatttgaaaataatatgtatgcaaatgaaatttctgcattattaaatttagatcaagttatgttaaatcataactccaatcccaacacaaatcaatccctttcctcaatagagaataatatgatggcatctaataatgcatcatcatcaatatttgattcaaactataaatttgactccaacagtgataaaccaaaggatactgtatctgaattaaattatgagattgatgatgaagatggagaagattataatagaactaatattaaaactgaatctcaatcaacatatgatacgtataataggaaacctagtgtggtaaataatggtagtaattcaaaccgtatcaaccccaatatacccagtgaagctaataataccaatcgtaggaaaggcaaatcagcatataacatagttaataatgaaaaagaaatgtcagaagaaaataaaatcaaagaaaaaccatgggttgttgaagattataacgatcgtcgtgataaatcattttttggaatgattagagaaaacactattaatgatatatattatcctttgaatagtggtaatggattaattggacgtatttgggcatacggtgatagatacggagatacgaaagtctcgttcattgttcgtaacccaacattgaatgttatttatggagtggttacagttatcattgatgaatatagtaaaactggtagagtgatttacatggttgtttccaaagctaaaagaagacaaggtgtaggtgaaattttgcatagaagagcaattcaatatatgacgattgttagaggttgtacaacaattgcattaggtagtgttttcccattttacaattatttagtacctaaagttttgaacgaaattagtagtatttggcaatatttagaaaccaaagatgattccaaaattgatatcgatgatagttctattcagttagttggatttttccgttcattaggttggaattacacaagacataccaagggtgtttatcaacaaactagaaaatatttattacacttaaaattgaaaaattggagattcccagcggagcaaagtccttttattgttaatagtttaaacataaagataaatagcacgtttgaatttatcgaacagttgaacagtttaaatgttaaatttattttaagtaatgatcctggaccaggttttgaaatttgccatcgattgcttaaaagtggtaaaacaaaggatgatgaagaaattgtattttcaacactctattctaaaactaaggagtttataagaagagagattgaagattataaattacataataaaagacgaagtactatggcaatgtatgcatttgtggatggtgtaattcaaggagggtgtatcatatacacgagtaatagtgaaatgggtttttactatccattaattgatcaatataagaaaacaccagctgaaactgtagcgggtatcacaggtgtatttatcaattcactggaggatgataaacaattaagtccaaggaacaaaaagttaattcaacatggattaatatctgcatgtgttgatacaatcggtaaattaggtattgaacaattgataattcataatataagtaaagaaactatgccagagttattatcgtgtggatttgtgaaaagtcttgaatactgtgcatcttttggtaaaaagagggcatttgaatgggtcgtatagtatggtatagaagggtatataatattaatacaggaaagttatatagttctaatcttatctctatgtagtgtcttcttcaagactatccagtacattgttttgatcatcatcaattgtactgtttagaattttattatcatctttgatatctctgttattattattactgcgtatgcctaaataactttcatcaattgatgtttcgttttgattgtccgtttgagctgcaactgctgcagctgcagctgctattgtttcaaaatcagcatctaaacctaaacctttgaaatcttcagctacaagatgtatagttgttggatcacgtctgagcattttggaccaaaaggaagagatccgattgaagagtaacagtatataaattttgagaacatgaattttttcaacagatcaaaaatattcaaatttgaaaataatgactttttactaatatgtttcttcttttaccaacaaacaacaatgttcttagttatagtctttgtgatggtagtgatggtggcaattacagttgtattgccacaaatttctggtgttgctagatacacacataatccagattacgatgctaaaaaagagagagaaaagatcatcagttaaatctgaacaacctgaaattcaatcaaatgtttacagagcaccagacgaagattttaattctgataacattgattcagctaaagtaagtggacataatggtagatttggtgtacgtgcaacaattaagaaaattgtccaaactccgataactgaaagtgatatacctgttaaattagaaatagttggtgaagaaactttaaagcgtcgtgtaaggggtgaaagatcaagtgggagagcagttactgatcctaatagttatgattttaatattgatgattttattgaagaagaaaataagagagatgaaatggagagaagaaatgaaactcttaaaatgtatggtaatgctgatgtttaatgttttctaacgtatatatatacatttagtacagttttatatataaaaaggtgtttacaaattagcctgtatattagctatttgagcagcagattccgaatcgtgtgatgattctgaatgcatcggtacattagaggattcttccatttttgtttcagaatcggatgtagagttagaatcgatttcacctttatctttatcgtcaccatctgaatcggatgaatcactttcggattcactttcaggtacattttccatacctaattcttcataaatatcatttgaatcagtaccaatttcatagaatagcatataagtaccttcactatttaaaacttcatccttagtgacaattctaacagtctcatcacttatataccaccaaattccacgaatttttttatagcaaatataatgaccataattatgagtaccataatgagatataactgctttaagtgaataatttaattcatttgtttcattaattttgaaactttttcttgcatcaaggttaatattacttggttctgcaatataatttgacatatttaatatcattggaaaatcaacttttgaattatttttccttattctataagttgttggatcaaaaacacttctattaatatgaatagttaataatggaggaggtcttgcaaggtatgattgtttgattttacgacattttataattgaattttttgtatgtaattttttataaatatcatcattaattgaattaagttttaaaacatcatcaatttcatcaattctatttgaaattttttcaataagtatgtttgcactatttgattcctttaattgatctaatttttcacataaattatctctcatattatttaagccacatctattacattcaactccatcaattacttcagttgatgtaaattcatctaataaatcagttaattgataatgattaaattgactacttggcatatttagtgataaaccacttaaaacactaaatcttataccaccaatttcaccacattctaaacaaccaattctatcacattgaataccatcaactggtgtaattaaattaaatggaacatatttatctgattcgattgaagtatcaattaaattttgtggtatataaactggtcctaaagaatctaaagaatctattttttgtaaaccagttataccattttcaggtaatgaaattgcatctttatttggtttttcatttaatgttgatttgaattcaacttcaatttgtttcataacattttgataaaattcttctgcatcttcttgattataacctaaaaataaatgtttatttggtgaatctttcattgctttcaaaaggtttttagtagtataagttttagtttttttattatttgattcatttaattgatttataaggttatttagagcatttgaaaaaattaacttattatttgaatttgaactatactcatccagaaaatttgtaaataattgtgaacttgataatgattgtataacagagttcatgaaacatgtattaccatcattttgtaaacctgatggtataccaccattctcatcatttgaaataatgtaattataaatttttttcaattttggatcaaaatatgttgaatctctattctttgaattaaaaattgaccatgaggaactaaatttattcattattggaaaataaacgagatgatgatgataatataataagaaataaagtaaatactactgttaaaacgtttaagttttccataatatatcaaggaaatataaattctgaaaagaaaaaaaattgtcaaatattcgacatgaattgtactgtattattattttacaatttgatagaaaagcgtgaaaattttttaaaaaaatggtattatacagatctttatttaatcctacaatcattgaatgtctttatacttacatgcatgtatgtaaatattgatacagttatttatttgatcttgcaactttagcagaatccattgcaactgaaatacaattagtttcataatcatcaattgatgaaatatttggatcaaaatttccaataacttccattactaaaggattaatacaagatttaccagaatctgtataaaaatgtcgtcttaaagcatcaggttcttgcaaattttttaccacaaccccaaattttcgaagttggagttaaaccataacatttgaattttttttcacctgaatgtaaatcttcatgtcttttacaatcatgttgtcttgcaaaagattttgaacaaaatttacatttaaatggtctatcacttgtatgagttttttgatgagattttaaattataaggtcttgcaaatgatttaccgcaaatttcacattgatattccaattcattttcttcattatcattatcattatcatcgttattatctccattactactattagtattattatcaggtaatggtgaataaattgatgaaagtgatgaaaatgaggaagagtgtgataatgaatttggaggataaagagatggtgaagtaggtggatataatgacggagaattcggagataatcttgaaggtgatggaccacgagaagaatttcttgaagaagctcttgaagaagctcttgatgaagctcttgatgaagctctagaggaatttctggatgaatttcttgatgaatttcttgataatgatctacttcttgaagataaaactttacgaccatttctcattaataaatgttgatcatcagttggtacggtaagtatatgatttgaatttgaaggtggagttggagtattaataaaatttggttcagtatcttcaacacttataccaatttgaggataaggtacaaaatgattatcaaataatgatggagtatgtattgaagaagtgtttgaattattagtatttattttatgtaataaatttccattaaattcatcattattattagtatttatattaatattaatattatggtttatactataattattgtaattgttataattatcaatatcataattatttacaaaattattagcacttatgctatcaagattatttatatcaagactatttatatttatttcgttggataaattgagggtattattgacaatgttgtttatatcgggattattgatagtatttatattattgtaattgtaattattattattattatcattagtatttatatgattagatgtattggaagtataagatgtattagatgttgttctattgatattataatcgttatttatatttatattgctattattattattatcattattgttattatcattttcattatcattagtattattgatattaatgagggattccaatgaatttaactgatcgaggggatcactgagagagccaagaaaggcttcaagatcagaattagaagtggagaaaggtggtgttgccattgcaacaatagaaaaggttggtaatattaatattaatattaaattactttaggtaaaaattaatttattatcgtcataaaatacatatacggttaaatcttggctatacaatttgctaagctcaaaaaatgaaaatggaaatggaaatggaaatggaaatgaaagtggaaataattaattaattacataagccctgagacgcgactactgtggtggctcaacattagaggaacattgaccaatatagtttccaggtggatcataggaacagataacataatctccccaataatcaccacaacttttaactgcacaacctaatttagttgttgatttccaaataacttgagtgaaatgatctaaaactgaacatgatgaaccataattataatttgtaccttcattataccaaccttcaactgcaccttcaattccataacctaaagctaaattttcaccatatggaccaccagaatgagttaaagtacctgaacaatcataatttgatgcataattagctgcataagctgcaagtgatgcatcccatgataatgcaggtgcattatgtaatgaacgttttgcattatgagcatttaataaaactgttgcattatcatcaccagatgctgctgcagtggtagttgcagcggtacttgcagctggagttgatgtagatatagttgattcagtggtagcatcttgtgtagtagttggagtgattgtatcctctattatagttgaagcaggggtatcatttgtagtacttgttacaatagtagtaggttgtgcagttgttgttggagtagcattattattatttttattaacattatcctgtattatagtagttggagtatttggatctattaaaacaggttgtaacaacagtttcaataactgttacttgtaaaggagcggcaatagctaaagctaatgaagataagagtgcaagacgcattatttgaaggaaaaggaataaaaatttcaggaaggtacttaatttcattttaaggatataggtttaagctttatagaagatattacaagatactctaagaatggaatagattgagatgaaataagataatatatgaatgaaatttaagggtactggaactctatgacacgtcaatagcgcgttgtttatgtttcaaaggggatatagcgtgtttgattaaaagtgataataatagataataataatatccaaatgtattacataatcaacaatttccttctacttctacagtcccatcgacgcacaggagaaattagaaaaattgaaaaagcggcgtcgttaaaaaagcgctcagtggaaagaaaaaaaaaagatgaaaaaaatttacaaaaattgctgtgcctccaatttcaacagctgaacctccaataattcattattataaacactggaggtattgttctatatacattttgaataagtgtccctttacaatataccattatgaccatgcctttaccactacctgacgcccttggtgtccttgctgcagcttctgcttcggcctctgcttctgcatcagttgctgcttcaaatgtaccttcaaatgaacattcaaataatacatcaggacaaaattctccacaatttcaaaatcaaaatattaatgttaataacaatatctcttcatcaaatcaaatacaaaactcatcatcctgaacatcaagtattagaggctttaactaaactacgatcgtcatcatcttcatcatctgctaataataataataataataataataataataataataacaataataatagcaataatactagcactacacacaattcattaccacctgctaaaataccaatctcacatttattagaggcaacttcattaactaataatagtacaactaaaataacaaagaaaactcaacgtaaacgtttacaaccaacattaccaaaaagtttcccttgtcctcattgtacaaaatgttttacaaggaaatcaaatttagatagtcatttaattacacattcaagaaatagacctcatatttgtgattcatgtaataaagcatttgcaagattaagtgatagaacaagacatattcaaacaactcatggaccttcaagaattttccaatgtagaggttcaacttcaattaaaaatttaacaaatttaaatgaatggggttgttcacattattattcacgagctgatggtttacgtaaacattttagatcacatgctggtagacattgtcttttagcttttattgcaggtaatccagaaattttcaactacaagtgaaatttgtaaaaatcctgaaactgcattagatgatccaaaacttgttgaattagctgtacttaatgttagaagtcattgtggatggtaagataatgtgaaatttaataattataattattcttataattatttatccattgtatagtttattattactctttatttgttatcattaatatctctgaaaactaagaaacctttcaaccgcaaggtaatgaaaatccgaaatatgcggttgagtcatgcccattccttcgccgcacttacccacttaacgaaactgtggctcaaccggtgatttcgttaacttccccctattgttcactcggggatgtggagtaaaaaaaatttatttttgtttatcctatattatatacttattactactattatgaatcaatgaatcatctgttcggtaaattgaatattaacttttctgttttttcagcttaattttcacctatatatattctacttctacttcctttctttatgtagcaatgactacaactcttgcaacaccggtatgttatgcctttcatcaagttgacttattggctcaaaaattacctactccaatttataaacctttaaaatatattttcgattatgctgtaaagaaatggttctttgtaggtttagcttgttttattgcattagcctaattcttatccaggtgcaactgatggtgttcatatagattattgggcagttgcaattattttctttatttcaggtttatcaatttcaacaaaagatttattatcaaatttatattatgttcaagctcatatatcaattttaattatgtctttcctaataacttcttcaatagttttcggtatttgttgtggtattaaagctgctaataatgatgcaatttcaaattggatgcttgcaggtttaattgttactgcaacttgtccaacaactgtttcttcaaatgttgttatgacaagacaagctggtggtaatgtcgccttatgtttatgtgaagttattattggtaatatgttaggtgcttttgtaactcctgctttagctcaaatgtttttagctggtacttggaattttgcaaatcctgcaaatggtacatctgtttcaactgtttatagacatgttatgatgcaaattggtttatctgttttcgttccaatgtttgttggtcaaattgttcaaaatattttcccaaaacaagttaaatggtgtttaactaaattaattttaaataaagttggtacttttatgcttttattagttatgtggtcatcattttgtacagcttttagacaaaatgcttttacttcagtttctcataaatcaattataatgatttgctttttcaatttaggtatttacctattcttcacacttgtttgctttgtttatgcaagaccagttttccttttgaaaattttcaaaaatgaaccagatgaaaaatcatcgaaaacttataaaatattatatcatatttttagaccattttattattcaaggaaagatacaattacaattttattatgtggacctgctaaaactgctgctttaggtgtttcattagttacatcacaatatggtttagataatcctcatttaggtcaattgttagttccattagttctttatcaagcagaacaagttttcactgcaggtatgttagttccttatatgaaaaaatggattcatgcagaaaatagtgaacctgaatcagatattgaatttggtataactagaactgaaactagaattccaggtttaaatgataatgaggaggttgaaggtggggataataatgataattatcgtgaaaatgaaaatgatacaactaatacaaatactgaatctaacataactgaagatttatctaatgaaaagcaaaattccatataacataattaataattaataattaatagtataattaatagtataatttataataatattttataaataagaattcatagaattttagttaaatcaattaactcatcaatctcataattattaaatttataatcattcttcaaagcaaaatctttaatacataattgaccaggacaactcttccaatgtttccttaaaccatctttacgtgaataaattctaccacaaccccatttaccattttcattaatttcaccacatttaaaagttgtctttaaatgtaatgatctttcatgtctattcatatcactacgtcgtacaaatcctttaccacaatgtttacaaatatgtggtttaatatctaaatgaactctaatatgtgaatcataattagatttacgtgggaaaattttaccacattcacaaataaatttaccaactttatttaccttatttgaatttttcaactttgatttgattttaatgttagatttgcttgatttggtctttttagcctttgtagttactttaacagttgtatctttcttttcctcttttttgacattttccttctcattcacattttctttctccttctccttcaccttcaccatctctttctcattatcatccttagcagtttcatcatcttttacttcttcattgatttctttcttatcgttatcaatttccatttcaccatcattaataacaacaatacctaaaccaaataagtgttcatcagaacaataaaaatcacttttatttaattcaatatcgccatcatcaatttcttcatcattatcaattccattatcaatatcattatcaagttcattttcattatcaatatcattatcattatcaatatcaatatcaatttcaatatctaaattttcattttcatattgataaattttgataacttcttcattattaaataatgtattaacttcgtaaatttcttcaacttcatccaaattatccttatctaatcccatctctaaatcatatccattaattgtcatatcctcctcactatcaaattcccatttataatgagttgtatagtgagtttcctcatgaccataagtaagtatattcatctctatcaattgaatatatgctaccttttaaataaataacaataaataaaagtagaataaccactctcttttataaagaaatctctaattaactcctttgccacccatgttatcaatcaatcgattaattaattaattagaactgatgatcacagttaaatcaccaataatcatcaaaaatagagagtctaacctattacggtaattttaatgatctaattctcggaattacgtaatgttttttttattttttattttattttattttattttattttattttattttaataattctacattttacacaattatttagtaataaataactcttcttctttttttttcttttggcgtttaatttaaaatattataaaataaaacaataatatagtaataatagtagtagttttaagtataagagtgtctatatctccttttccagttgaaataaaaacattgaattaatttatttaatataaaaaataattatatcaaataaattagaaacatttatgatgaacaattgatggtcctgattcatcatattcttgtttagaaatccacatttgttggaaagttgataatgatgctaaaatagaaccaccaatccaaactgaatactttctttcaggtggtgcaataattttaactttcattgatgatggtgctaatgcagtaatttccttttgcattctttctgcaatacctgggaacatagtagtaccaccagacataacaatattaccatataattcttttctaacatcaacatcacacttcataatagaattataagtagtttgatcaatacctgcagcttctaaacctaaaactgatggatggaataatgcttctggtgctctaaatctttcattaccaatagtaataacttgaccatctggtaattcataagatttttcaattgctgatgattgtgaagcagtttgtaattcttgatcataatctaatgcaacataacataatttttctttaatatctctaacaatttctctttctgcagttgttgagaaagtgtaacctctttcagataaaatcttcattaagtaatcagttaaatctctacctgctaaatcaattcttaaaattgcatgtggtaatgagaaacctgcataaattgggaacaacgtgagtaacaccatcaccagaatctaaaacaataccagtagttctacctgatgaatataatgataaaacagcttgaatagagacatagaaagctggaacattgaaagtttcgaaacataatttgagtcatcttttctctgttagattttggattcattggagcttcagttaataaaactgggtgttcttctggtgcaactcttaattcgttgtagaaagtgtggatgccagattttttccatatcatcccagtttgtaacaataccatgttcaattggatatcttaaagttaaaatacctctctttgattgagcttcatctccaacataagaatccttttgacccataccgaccataataccttgatgtcttggtctaccgacaatagatgggaaaacagctcttggtgcatcatcaccagcgaaaccggctttacacataccagaaccattatcaatgactaactgttataaattaaaaagggtagggtttaatgttagtattttgtttataatgatatgatgtaataaatcatagtataacaataataataattaagaattcccgcgaatgaaaacaacaaattaagcaacccatttgaaaaaaagttaaattttctaaacaggtggcaagtcggtttcatttttagagtgaggaaattcttaattaattattactatgagaattgtattaggtaaatcattttattggagagatggcttagtttataacgattgatttctttagatctcaatgtataccgatatatcagtatggtaattgtaattgtaattgtaatagtgaattattatctaattgaaaatcaattcactctttaatgtatgcaatatagtaattaataattaataatagttatgaaaagctattaattaataattatattcgtagatttcctaacacaattctcatatgatttaaaagggggggatacttactgctgcaatatcttctatataaggagttagtataaatattcttttttaattgaagttaacaatttaaatcaaaagacccaattgacttatttccgttattataatgagatgaggtatatggatcatacatcacctaagctataataactaatataaaaaccaattaaggtatatagaatttgaattgtcaaaatagtttaatattatacgtaccaatgtttgagttatccattatgtttaattatttatgttgtctataagaataaaagtcaagaggaaatagattaagaaggagggcgaaacaaccataataaatagaaattggaaattgaaattgaaaacaacgcttctttggacgctctcaatgattttcaatctatccattacacagacgcatcgactcttatacattctaactatctatttacactatctatatctaaccttttgcttattacctctcttttcaagcttttcctgtcttttactcttaactggttcaccatttaaaccatctgtagttgtaggattaacattacccttattctttgatgggaaaaacatacccattatcattgaaattatacccttttaatttccaaattgcgaaaattggtataattaataataaataccaaactttcatactaccaaataaaatcattaaaatatcaattaataatgttaaataaattatatcaatcatatattctgttaatcccgattgttgtaaatcatctcctgccttaattaatattttatatccatctgcattaataccatattttggtctaccaatcttttcaattatatattgacaaatcattagtggaattgaataaataaaataatattttttaccattttttggtctaccgattaaaaaaattgagattaaaacaataaaattaattatacctgataatttatgaattgatgataatgtttcagtatttctttgtgcttgtttcttctctgctgcacctgccattgtttatctttaaaagaaaaccctaatgatcaacttgttgatgattacattaaagttgttgaaaaattaatgttacagataattatatctgtagttacgtaatcacctcgctatcattaaggtgtattggtatagacctcaatgttaagaacgatataaacctatgtagaatcatcatacaagacaaatattatactactattattattataattactattatataaaatacacaaaacaaaatattatattattaataaaatattattaatttaataagataaaaaaactaatctaacaacaaccaccttgttgagaattaactgcagtacctgttaaactaacatttggtttattattaacctcaggttgagaattagccatttgttccttaatttgttttgacattaaaataaatgcttgttcaacatttgttgattcagctgctgaagtttctaataattttaaacctcttgaatctgcaaattcttttgcaactgcataatcaacaacttttttatcagttagatcacatttattaccaactaataatttttgaacattacttgtaccatatctatcaatttcttgtaaccattgattaacattatcaaaactttcttgatctgtaacatcataaacaattataataccatgagcacctctataatatgatgatgttatagttttaaatctctcttgacctgcagtatcccaaatttgtaatttaattgttttaccatctaattcaattgttctaattttaaaatcaactccaattgttgaaacataatcagttgtatatgtattctctgcaaatctaagtaataaacatgatttacctaccccactatctccaatcaagagaagtttaaaaagataatcgtagtccttattcattatatacaatcccttaccctaaagaaaacaccctaaacaaccattaaacatcaatcaattattaaaattcgcccctactataataaaaagcaaaaggcaaatttcatattattttattatgtaatcgtttcttcttatattataatgatagtaactacatgtgtacaacccttttaccaccgccttatagtatcttatatcatccatcgcatttttgtgacacgtcgtattttatgtctaacatccctgcggtgatatctactatgaacaataggtaaatgataataacagatataataatgctcatttacattaataaatagataccgattgcctatttaggaaggtggctggtttcatgaatccatttttgataaaggattaagatatttaagatttaaactttaccagccatataaggtacatttcctaaaatagaagaattataacccaggtatctggctgggttacattattttaatttgtttcaaattatgtttcatcatttgtatagtatataacttaccagaaatccttcgtttctaaaattaaacatattttactgaataaaatgtttgaatggttaaaaatattttattaattaacaaattcttttaacaaatattattaaatatttttggttctggtatatacttcattatatacttccaatataacttactatattatattcaattcaaattcatcgatttatagaacttttttcactttcttttaaacacattaattcttttcttagctcagcttttcattgtctaattcatataactgtatcaatcaatttacatattatatataatatatcaattagctcattgcatttttattttatttcattttatcttagtttactaaaaatatattttatgatatcaaacctatatttcaatcaataataatcaaacaaacttcagtcattcactaaaaacttattaattacaattacaaatattatacacatataaattatgaatttccaattagataatcaaaaaacaagaagtttaaaacattcaacttcatcatcttcattacttagtcgtacaaggaaattatcatcagaattgaaaatttatagacctttaaaacgttcaacttctttaagttatagaacaaatataccaaaaactacaactataaatacatctaattcaacaacaataaaaaccaatataccaaaatcaaattcttttagagaattacctactccaacatcaccatcttcatcttatggtaaaagacttacgagaagatttaaatcattgaggaaaataagtacaaatacagtttcatcatcaagtacattatcaaatatttcatcaccaattttcgatccaaatattaataatgaaacaataatttcaccaccttcaagtccatcacaatcaattccaagtccaaaaatttcatataatgaagatttaattataactgataatgaagatgaatttgattcatcattttcttcaatatcaagagatacatcatttaatacatcatattcatcaatttcctcttgtgaatcttcaccaattaaatccaaagcattattcaccgactacacattacgtcaattaaaagttacaactaattctgatgatttattgacattaaatacacattcaacaataacttcattttcaacttcatcaaaaatattcgaaatacctgaaattttagaaattattttaagatatgtttcaattaataatgatgaaaagaattcaattgaaccgaaaatgtatcgtcgaccaccattatcatataatcattcgttattaatgtatggtaagaataatggtgagaaaatttgggaaagaacagtatctgaaggaataaattataaagagacatctggtaatagtacactttataattgtttattagttaacaaacaatggaattatcaaattaatcaaatattaaatgagaatttagttttcaataatgatgaaaaatttgaaaaatttacatcaaataaattacattataaggataatgtaaatgaaataattgaaccaatttcaatcaatttaaataagattaaatcgccaaaatcaatttatgaaatatttgaaaataaattatcatcaagaagattagagaaaattgaatattatatttgttcaaattttttaccatcaattaatttaatttcaaataatttgaaaaagctagtacttccaggttgtaagattttaaatgatgataatttaaaaaatttgataagtaaatccccaaatttaatacatttagatattagagcttgtgattcaattactgattcatcaatttattttattgccaataattgttccaagttggagttattaaattgtggtagacataaaagaggtgaattaatttcagatatttcaattggattaattgctaaaaattgtccaattaagacaattggattagcaggttgtggtatctcagattggagtatttgggaattagcattacattgtggatcaacattagagagattaagtattaattattgttggaaattaactgatgttggaatttgtaaagttattaaggcaaaattaattgaaaaattatcagttttagagatacgtggaattcaaatcaataatattgaagatttagttaattggagaattcgtaaattaaatgaagaaaattttaaagttttaattgaagcttgtgaaagaattgatttaatgattaatgaatttgaatcaaaaattaattatgaaaataatttaaaattaatgaatgatttaacaaattggattaataataatgacaatgataatgatattaattttagaagttttttaaataatcagttatatagaatagaatggtatgtaagtatacataatgtaaataaatcaaatcaaatcaaaaaaaaacgtatgcttcacaataagctctataaagaactaatgaattcattagtttcaatatttaattcaacatttggagcaacaaagaaaactgcaccagtgaaaacatcaagtttattttcatcattattactaatagtaccattaccttcagttacaattataattgaaggaccattaatacctttacaattagccttaccctttttatcgaatttaacttgtaaaactgaaaattcatcaattggtggatcatataaattaaaaattgcatcaccattacctctttcaaaatttgctggatttaatttttgttcatcaacattatttgttgaataagttaaactattaattaaagtttcaacatctttaaattttggtgtaaaacctgatctaataacattatcagaagctgccatacattcgattatatcacctgaaatataagcatgaggttcacatgcttgtaaaaacattgcttcacctgttttcaatatacaatgattaagcattaaacaaccacaaaataatccaatatcatttggaaattgttcattcaaacgtaagataagatcagataatgtttcaccatataatgatggattttccttagcttttgaaactaatgaatttgaatattaaattaaatcatcatcatttgaatacataacttttgagaaaactaatttaagattttcctttgaaggattgttaataaatatttgagttgtttcatcaccaataagtgatgagaattcttttatattaagaagatgatctttaattgtttcaagaggtttaaatccacaaaaggcttcaaaatcagtaattgcaattgccatttcaggtttatgattatcatcaggataatgttctggatcttttaaacgtaattgttcagctaattttttatcaggatgagattgaattgataaaactttttcaattgataaaactttgaaaaggaaaggtaaagaattttttaaattaaatttttccataattgattttgataaatatttttcaggatttgaactaattaaatcagataatttttcaccattagttgataaaatagttggaactttagggtgagtacccatccaatattctgcatagggtaaagattcatcaataattacattttgaggatcacttgcatgagcaaatctagcaactgaagaatttgaacctaatttaccccaagcataattttgaggaccaccaataactctaaccaaatcgtttgacattgtataataaacagaggggggtatatagtttagtatataggatataaagaagatacaaaagagaaagaatttagaaaagaacaggtaattgtaaacagattgaaatatataatcagttaccagacacggaacaacctcatccttatatagtaaacaagaaaacgcgcttttctcctcataatgaaattataatgaaattggcaacggtgaatgtggtcttttcaatattcggtctgttatcctaattagtgaagtagtaggtgtaggtataagtgttagcatgtaggtttatgatggtacagtggactgggttcagtgttctcagtgggtagatcgtatatcttactgtaatctggtgtattagtagtgttattatcagatactttattattattattagtaagacactaaactaaccattgaaactggtggtgttggtggtacttgtatatttggagaattagatcttaattctaatattggatcctttaatctatcattataagttggtggtatatcctttaatgaagtaattggtatttcaatttcatctgatggttcaattatatttaaatattcatcattgaaaagaaatgaatcaggatttaattcatcacatgaagaaacaattaattctgattgtgactgtgactgtataattgatggtaatttatcaaacattggagttaaattatttgaaaaatttgtttctctatttgaaataattggtttattatataataatggtaaatttggatcaatgaaaaaatttattggtaatttactcttaatttgtgaaatatgaccatcaggatttaaaaattcaatgaaaattataagtctatgtttaacattaattaatttattattaatatcatgaggtaatttccttaaattatttggtaataggtatattagctttcaatgcccaaaaatcatttggtagataatcattattaacatatggtaaatttgattggaaaataattttctcatcagtgaaagttgattcaccaaaattattattattaaaagtattgaatttaatcagttgagcaatttgaatagttatctttcccaatttaatatttttcaataatggttgtaagagaaaataaattttcaaatttgaatttaaaggtatgtaagttgaaggtaatctaattttataattaattttattaatccaagaattttcagctaaatattcattacaatgagatgataataataactgtgatggtttcttaataatgattaaatgtttaaaagaagtacttgtacttatactatcatcactaaacactatcttactttgtaaagaatgaacaatactagcatatttgagacactcaactgattctaataattcatcaaatggaacactgatagtaaatcctattgaatgattacctcttttgtataataataaagtgggggtgttattactattaactttaaagagggggtgcgatttataactattaagtagtgtactctctttaaatggacattcacatatcttcataccgtccttcgtctggaaggtttcaatatagttaatattataatgagtatttaaccttatatcaatatctttaataagtgtatcttcattaagagagaatacaatatctccacttattaaaattttattatcatcatgaatattattatcagtgtctataattatggtatttctaattctactatctattcgtatatcatgtaacatttgtctatagtctgtaatatatatagtctattatcatacactaaatatacggggtaaagtaaagtatttaaagtataaacctaataaacctaataaacctaataaaccctttaacaataataaaagtgaaaaaaaaagaaattttccgattggcgctatataaactattattataactacaataacaacggtcttctctcattatcttcaatgtcttccgtacttcccctatttgctgattcatctattgattctattgattcaattttattaagcctcttaattattattatagcccctcctcctaacaatgtaattaaacttaaaattaaaaatccatatctttgtaatcctctttcatacattatggcataaattatacctaaaattccacctccaattgcaggtgcacaaagaaataacccccatgcagatccaaatatttcaaccccccaaatatttgatactaatgttgggaataatgtgaaaactgatccatatgaactacccattaatattgttataattgtaattaatcctttacctactactattatcatcattatatcctttaaataataaataatatccaaaacttgtaattattgatgtaattaaaattaatctaattgatgttattatactattaccaataaaatcatttaaaaatcctattaaaaatctggcaattgtactagaaattgaaaaaattgaaactaattcagttaattcactacctggactagaaattgttgataaatttgcaataaataattctaatggtccacttaaaaataataatgaaattaaaacaattggcattgaataacttttcaaaaatttcttaaattttaatttatgttcttcattaatattaatattatcatttattgcatcattctcttcttcttcaattaatttggcaaatataatttctttctcaattgtaacaacaaaactactcatccaattaataattgtaacaattaaataaatccattgtaaaaattcaaaaaatttactcacatcaaaactatcttcatcacctaatactattttcaaataaacttaatgaactaatccatgaaagtaaaaatgcactaactccataacatgcaactggtaatgaaatacttatactcttatttggataaatttttgcacatgttaataaactactaaaatatgaacttgatgtacccataccaattaaaaaaaatgcaaaactcataattaaaacattattatctaaatttttaaattgatattctgcaatccaatatcctggtataattaaactaccaataattgctaaaaaaactgatccatgagcatctccacaataacctaaaattggtaatgttaaatataatccaatcatcattgaacttgcaattaaattattttcaaatgctgttaatcctatattattagtaaatgataaggcaaataatgggaataatgaaactgatccatctaataaacatgttattaatgacattgcaaatgatactttacgtaacttttcattatcaatattatctttaagataacctcttacatatcctgtaagtactctctctacccttgacagagtcattgtatggtatatatatatattatattattatataaaaatcctcctactctatacaacttgcataaaagacttccttgcttgttcacgtaatgaaatttcaactttttcattttcatttccaattttaatttcccgtgtttgaaacactttgactgctctgttatgggtgtatgctctctcctctctgcatgctgtgttgttatggaacttatcactgttatcacttagtgtattgttacctacttgtatcttaaatgatccaaaatcagtcttatcggaagatttcactctataaccctcttcaacttcatgtaatagttgctccgtcgtatgattattatacattgattgttcaactgtagtcattataaatcctctcttatcatgtaattaatggattggttccaaatattccatttaaattcaatctatttaatgaattaaatgcaggtgcaaatgtaattgtttcatcattaactctaacacaaatactattattattctcataattaacatcagtttcattattaataaaacaatatcttgaattcagatcaaatcaagtactttattattttgattattaccactattttgaaaccaatttttagttattaattcaataaataaatttgttaatttagttattaattaaatcatttttattaatacttgtaattaatactggattttcaaaattaattggttcattataatataaaatacctttgttaccttcaattaaaaaattttctaaactaatacttgatattttcaatttttgtaaatattgaaacggtataattaaattataatcatcaattttataattacccttaatatcaaatggtattttaccatctttactattcatattaatattaattggtttttcaatattaaataaaaacattgatttacaattacttggtataaatattgattcaatagtattatcattttgattattactatttcggtaatttaaatgtactacctttaataccaagtttttgaatcaaattatcacttataattgatgatgttaaaaccaatccagtactttgatcattgatataattatctgtaaaactaccaaatgtatccttatatttacttaaactactaattttacgattgttatctactaaatggttattattatcaataccaataatattactactaatactactgctgctatcctttgagaatatttcattattatttggtactttattattagataataatgatgaaactcccttaggtataattgcagacattgacattgttatatacaatgttattataagcaaatgccacataatatactctgttaatatactatgatattgtcaaaagaagaagaagaagaagaagaagaagaacatgcctaataaacaccaataaacagccctacttaataaaatcctcttaattttaaaatgctcagcgaagtggacatccttcaatgcctacaatacacctcttttctttcttctggggtttaatctttacttgaacaatgtcaattgtacgtaacttacgtcccattggattaacatccattagatcaactagatctttctccaaaatttcacctttatttaataaagttgaagattttacacattttggttacaaaacagttccaaaggaagaaaaggaaaaattagttcatgatgttttctcaagtgttgcatcaaattatgatgttatgaatgatgttatgtcaatgggtattcatagattatggaaaaaacatttaattgaaaaattagattgtggtatgagaccaaattctaatgaaccattacatttcttagatgttgcaggtggtacaggtgatattgcatttggtttattagatcatgcacgtttaaaatatggtgataatttatcaacaatgacagttgcagatattaatcctgatatgttaaaagaaggtgaaaaaagatgtttgaaaactccttatgcaaattctccaagaattgaatttttagaacaaaatggtgaaacaatggataaaattcctgataattcaaaagatgtttatacaattgcttttggtattagaaattttacaaatattcaagctggtttaaatactgcttatagagttttaaaacctggaggaattttcgcttgtcttgaatttagtcaagttgaagatcctgcattagattatatttatcaaatttattcattctctttattaccaattatgggtcaattaattgcaaatgatagagaaagttatcaatatttagttgaaagtattagaaaattcccaaatcaagaaacttttgcaaatatgattagaaaagcaggtttttacgttcctggtaaaggttatgaaaatttaacatttggtgttgctgcaattcatattggtgttaagatttaaatgattaattaatataaataactaactgactgtctatagatttaataacataacatactataagtaaattcttagatttcgcactataaaaggagagggatttcccacattttctaaccttctatacttcttcttgatctttctcttcttttaacatccttatgctagggcattacgtgtatcagtgaggattcgtccgagatcatgtgtttgctagttgaaaacttcaacatgactgcttccttatattttgaatatttggagaatttttcaatttattatttatttcgataattgtttaattactatgtccttgacaagtaatttaatagtgtcttttttgtaattacattgtaatgtatcgtaatgtattgtgcgatgttaccaatcttcaactgtagatctgatttaagtatatatgatgtctttcttcatactatatcgtatagtaaagacataatagaaataattaaatggaaaatatttttctttaatttcccatcatgatgtttctttcaaccaacaaatgttcaaaaaattctctaaagacgacgttcatacacgtactaatgttaaatcatcagttgctaaaactcttaagagtaaattagtttcacaatatccaaaattagaggatgtaattgatgaaattataccaaaaaaagtaccaatttcactttataaatgtgaagataaaattcaactttatgttgttaataatgaaattttattttatcaacaatttgatgatttaatacctgaattaagacttgttcataaatatcctgatgcattcccaagtgttcaagttgatagaggtgcaattaaatttgttttatcaggtgcaaatattatgtgtcctggtttaacttctcctggtgctaaattacctgaagaagattggccagttaataaaatcgttgttgtttatgctgaaggtaaagaaaatgcaatggcagtgggtaaattagctatgtcaataaatgatattaaaacaattaataaagatacaggtattgaattatatgaatatttaaatgatggtatgtggaattttagagattaatttattaattaattgattaattaagttaaatagttctttacttatatataaaatttttataaatagtttataattgatttgtggatttcaaactttgacttgatccattaccaagtttaaaaataggattgaatttacttttactattatgattatgattattattatgatggtataaagttggatctctaaatgatgaaaatgtaaatgaatgttttaacccttcaaattgtaaatcaaatggtaaatttggtgaacttgaaacttctgattgtttatccattggtggtggtattactggtgataaattttgtaattcatgtaaattcattgttgatctagttcttaatccatcaatattaaaattatcaatgcttttctgatgtgataaacttctaccttcctctaatccatacatatcttcaacggattcagttttattattttgaatttttcttaacattttctttaatcctccaaatttttttaatatagtataataaataccaccacataagtaataaaaaaataagaaatgataaaaatgatgatgaaactgaattagaagttattaattgatgatggatcactaattatttgatcatttgatgatttagaattatctattgcagaacctggatatattccaacacttccatcatcatttatttgacttgatgcatataaaaccattttacctaatgtccaagatagttcattaccgttaatattattaacacttctgaaaactggctcatcactttcctttaatttagaatcatcatcaatacccagtcttggtatatcaaaaccttcatgtaatatattaacaatccaacttgccttaaaacatgaagttcttaataattctaatgttaaattttcaccgtattctttattattaaatctattcattataatatcccaatcagtattacaaaattcctttgttgctttctcaaaatcattataattatagtcaccagttaatttgaatacatcgtttgcagtataccaatattcactaacaccaacaaatttttccagtgcaaaattcattgaaggtgcatgaactccattaaataaacaaggttcatcagaacaaggtaaatttttcaataacaaaggataaattgtctttaaacaattttcataattaccagaaccagttatagtaaaaacactttctccattattatattcaacatcagttttcataccaacaggtgaacaaggatccattaaatctgctttaccatcaccatctttatcataattaacatttttaggtaatgcattaagtaaactttctaattgtctaactctagcttcatttgcaccaaatcctaaccaacttgaaacaaaaactgaccaatcaaataattcaccattgtttttacgtaatttaacagtatataaatcatctaaatgtttggttaattgatcattagagcttggaacaaatgcaagttgtgttgatgctccacccatatccataaatccatatgggtgtatataggatttatcattttcatcatcattaccattattaatagttaatctattagttaagtaatttaacgctaaccaaccatataaaccttcaatatcaccatcaataacttcaacatgttcatcacaagggtaaatttgaaaatctgtctccttatgaaaaacattacaagtttcttttaatattctatctcgttcaatcgttggtaataatctcataccagcagttgcttgaatgaaaactggtgtttcctttcgacttactctttggtataattttctttatttcatcatagatgtcttcaaaataatcatcccaaatatcttttccatacattttaccttgattattaaatgttgataatcctggtttaatctttttataaccaatttgtgtaattgttggtaatccatttggatttaattgtttatctgatgaaaattgatacactaatgcacgtgagccagatgatcctgcatctatcactatagcgtattttgatgacattcttattgtgaataataaaaggagccttacaacaaagtgataagatctaactcaacagattaaactgtgtagacaccggcctatatacacttcccaatgaggtaatcatgatatttcaattttttattatgtgaagtcttttttcactgcatgaaattttttttaaacatgaaatttttttttcactttttattttttaatctttgatttaattaagaaacttttatcaacttgttttttaattgaacaactaaacctacaatgagagtcaagaagccaacatccaagcgtatgactacccgtttaagggaaggtattaaaaagaaagcagcagctcaagcacgtaaagataaaaaatctgcaaagaaagatgttacatggaaatcacgtagaagtaaggatccaggaattccagcatcattcccatataaggataagatcattgaagaaatagagatgagaaagcaagaaagagaagatcaaaaacgtagaatgaaggaagagagaaaggcagcattaagaatgaatgataatatcaatgatgaagatgctgatatgattattgatgatgaaaatgcagatgatgatggatcaaatgatatggcagcattattagaaagtgcagaaaatgcagcaagagatttcaatggtgaagttacagttgatagagaaggtgatgatggtatgggagaagtatgaagttattgaacatcaaattgaaaatgatgatgatgatgaagaatctgaaaacaatagtgaaattgaaaaatctagaaaacaatttgataaaatttttaagaatgttgttgatacagctgatgttgttttatacgttttagatgctcgtgatcctgaaaatactagatcgagaaagattgaagaaacaattttacaagtcatcaaggtaaaagattaattttattattaaataaagttgatttagttccagatgaagttgttaaacaatggcttgattttcttggatcatcattcccaacaattccaattaagggatcaaatggttcaaatggtggtaaaagttttaataaaaaattaacacaaaatgcaacaggtaatcaattattattagcattaaaggcatatgcacaaaaaagtaatttacatagagcaattactgttggagttattggatatccaaatgttggtaaatcttcaattattaattcattaacattacaacatagtggtaaaggtagtaataataagaattctggaccatgtccaattggtaatcaagcaggtataactaagacattaagagagattaagattgataataaattaaaaattattgattcaccaggtattgttttcccagagaattatgatagtaaaagtcataaaaaattaaataagaaagaatatgaagcaaaattagcaattttaagtgcaattcctgataaacaaattgaagatccaattaatgcagttaaatatttacttaataaattatctaaagataattcaatggcagatagttttaaagaattttattcattacctgcaattggatcaagtgatttaaatgattttactaaaaaagttttaattttcattgcaagaaagcaaggtagattaggtaaaggtggtataccaaatttacatgcagcagcaagtattgttttaaaagattggagagatggtaaatttcaaggatggagtttaccaaaatctagtaaaagtgaagatcaaaataatagtaaaatacctaatggagcaagtggtaagaaagcacctgaaaaggttgaacaaactacaattgttaaagaatgggctaaagaatttgatttagatagtcttttcactgatgtatttggtaattaattaattaattatattatataataacttgtgtaatagaaatattcgttaatttaaagtatgttttatagtaattgttcaaagatataaagatattatactataactaaataaattaagctaatttatcaatagtttgtttgatagcacctggatttgcaccaataactttaccaactacttcaccatttttgaaaaataatatagttggcatagatgaaacatcatttgattgtgcaacagttggtaattgatcgacatcaactttatagaaagaaacatttgaataatcatttgagaatttttcaagcattggagcaatcattttacaaggaccacaccaaactgcgaagaaatctacaactactaaattagcagcagaaattgcagttttaaattcagcttcagattgaataacttggaccatttttgtattattagtatttattgaatgaggtttatttgagtaaggtttaacagtagcctttttagttaaaaatttattcaagaggacaactaaacaaattaagagaagaaagtttaacattaattgattagaaggaaatagatgaaggtatttatggaaaggcaaaatatgaaaaatggtgagaattactcagcactgtgtagaatctcgattttaatttttatattgcatggttttttgatttgtaattggtataacaactgactgtggcaaattgtacatgtgtgcttttcttttcttttatgttctttctgtttcctctgatatacttatattattaatcaataagagagtatattctaattgaaccatcactgtattagtaagtaattgaatagttcagttgatagatattataataattataattatacttaaattaaaatagtagttaataataataataataataataataatataaagtaaaagtagttatcattgattgatatagaccatagactatagagtatagagtatagagtatagatactgttaatactgttaattacaagatactcttataagatactcatacaatactcttataataaaaagctgagcccactaactaactaagaaaaaccctcgcaatattcaaataaataaggaaaataaagaaattagttgttaaatttccgaatataaccgtcgttcccccaatttcccatttgttcccgcaaattgactaaaaaattgactaaaatttttactgcaacagttttcatcttcattttcattttcaacttaacttgttttgtcttttaaatttactcccttcatattggcaaaattattatatcacaaaccgatattaccttatttttgcattagcatttattcttttattcagtgattcattcatattactagtcctttctctaatttatcaccattcccttcaatcacaccactcatcctcaaactactattattaattaataatactatattatcaaaatataataaaggaaaattttgtattcactaggttaataataacaagaagaagaagaataataataacaataataacacattaaaagaaacaatattgataataataataataataataataataataacaataagtaactttcattagtaattaataacttataactaataactaataattagtataataagttttaccaaatgtcatttctatcaggttttctctgttgttttgattctggagattcatcgaaaaaggaaattcattcaaataataataattcaagtaataataaattaaattcaaccaaatcaactcctgcaagtttaaattcaaagaaaagtttaaattcttattcgaattcaaatactagtttaaatcaattgaatcgtccaaaattatctaaaactcaatcaaatttacaaaaggctttaactaattcaacaacaaatattaagactaataataatactaattctacacctgttgatagtattgaaaagaaaaatatcaataataataacaataataatatatcattatctaaatcaactgctgcactttcattacaagcaccaactcctttaccatcaaatacaaatttaaaaaatttatcagaaactggtaataattcaacttcctcttcaacttcaaaattaccttgatcaatcaaaatcaaccgaatatactaaaatgattgaagaaatatcagaaactaaagattcatcaaatagttctaaaaatgatgatgatataattcaagttcatgaaaatcaaactcaaaatactgatgatttagataatagtaatagtaatagtaataataataataatgataacaataataacaacaataacaacaacacagctaacaactttatttctaccaataatgataatcataatgataataccaatgataattctaatccaatttcaaatattgatcctcatgataataataatataacaaatacattaaattttgaagagaatttatatgatgaacaatttggattagatttaacaaaaatattacctgatcaagcagtttcaaaatctggttggttattagatgaaaaacctgcatatttaaaaaataaaaaatgtttagttttagatttagatgaaacattagttcattcatcatttaaatttgttagacaatgtgattttgttataccagttgaaattgaaaatcaaattcataatgtttatgttattaaaagacctggagttgatcaatttttgaaaagagttggacaattatttgaagttgttgtatttactgcatcagttgcaagatatggtgatccattattagatattttagattcacataaatcaattcatcaaagattatttagagattcatgttataattatcaaggtaattatattaaaaatttatcacaaatgggtagaccattagaagatttaattataattgataattcacctgcaagttatgttttccatcctcaacatgctgtaccaatttcaagttggtttagtgattcacatgattgtgaattaactgatttactaccatttttagaagatttagcatcaagtaatgttgatgatgttagattagtacttgatattaatatttaatttagtatcgaatatctaatacctttactaaaacaaaacccttaatgctggtcattatcggatgtatttctacaaaactattcctacaacttataaattaattaattaactaatattaatattaatataatataaataaaacttatataattcaaactcaagttctaatatagtagtaatacttaaatacttacttaaatactacatgtctgcgtcggtgcgtcgctgtgtattctgccattaaatttaaagtgcgcgcagtttctcaaattgcccttccttcaactatccgatgtaaatttaattagccactggaagaagaaatgtagtgaattaatatgatgaatgttgtacgttatttaatcaacggttttattatattcgtaaatagataaagaaataaaatatactagattaatatttttactagaataaaccacttttaaaatattcaatataaattacgacataatacgacacatacaacatttatatatcacaaatataatatagcaaatttaatataattaatataatataatgagtacagataattggaaagataaccttaatttaccagtaaaggatttacgtcctcaaactgatgatgttcttggtgaagaaggtgttacatttgaaaattttgatttaaagagagaattattaatgggattatttgaagcaggatttgagaaaccttcaccaattcaacaagaggcaattccagttgcattaaaaggtatggatcttttagctagagctaaaaatggtacaggtaaaactggtgcatttgttataccaacattgaataagataaaaccaaaagttgataaaattcaagcattgattttagttccaacaagagaattagcattacaaacttctcatgttgttaaaacattttcaagacatatgggaatacaagttatggttacaacaggtggtacatcattaaaggatgatatagttagattatatgatccagttcatgttttagttggttcacctggtagagttttagatttagcatcaagaaatgttgcaaaattagatggttgtgaaatgtttgtaatggatgaagctgataaattattatcacaagaatttcaaaatattgttgaacaaattttaaaatttttaccaaaaggtaatagtattagtggtaaaaaaaatggttatcaaacattattatttagtgcaacattcccaagaactgttcaaacttttatgaataatcatttagatagaccttatgaaattaatttaatggatgatttaacattaaaaggtataacgcaatattatgcatttgttgaagaaagtcaaaaattacattgtttaaatacattattttcaaaattacaaattaatcaagcaattatattttgtaattcagctaaaagagttgaattattagctaaaaaaattgcagaattagattattcatgttattattcacattctagaatgaaacaaagtgaaagaaataaagtcttccatgaatttagacaaggtagagttagaaatttagtttgtacagatttattaacaagaggtattgatattcaagcagttaatgttgttattaattttgatttcccgaaaaatgctgaaacttatttacatagaattggtagatcaggtagatttggtcattatggtttagcaattaatttaattaattgggatgatagatttaatttatatcaaattgaacaagaattaggtacagagattaaaccaattccatcacaaattgattcatcattatatgttgttgaagaaccatcagctgtaccaaaaccttttaaaacaaatgttactcatcatcaacaataatttgttttattcatattatatctttactcgaattaactaatattcattttaatcaattaatcaatttatcaatttatcaatcatataactttaatatgtatttacatcatttttttttctccttattatatttctatttcctttttttattactttttcttcataatgtttgagttcaattcattaattattaaatgatcaacattatgaccattctctcctgataattaagtttgttaatttagttttttctataaatcttgtttgtataagacttctattttatagttttttacaattaataaatttgattacttcatcaagacttattatgacatgattattgtcgtgtattggaaggttcaactgtaattgcttgtgttttgttggtatatactaatatgttattacatgaatttaaagccctaatgttgtggatctgttactgatactcaattgatgcaaaaataacaaaaaatgaatgttatttaataaccaaaaaattttaattaaaaatgtttttgagaaattaaaaatatttgaaagtataaaaaatcgataaaaacaataacaaaaaaatacgataatatgaacgtaataacatattataaataaaagacaatacaaattcacaactaaattaaaagtatacagaaattacttaattatagaacgatatacttatagtcaatttttcttacctttcttctttgaagcagattttataataacaaatccaataaatgaagtaactaaacaaacaccgactataagagcaacaacaggtaatgcaattgcataatatcttggtaaaaagaaatattgtaaaatattatcatctgcaataaatggagttacgaatgtccaaattgtataatatacgaaaataaatgttgctaataacaacattattaaacctacttgttgatcttcctatacagaattgttagtatatttatttctctgtgtaaattatattatattatacataccattattgttattgccaatcaggaataaacagagatgtcgttaatatatacgttgcagttagaattacgtgtttaatattacctaatactaagatgaaaatataaatttaaatctaaataatacttcacccaatgagggattggataatttcgctgattactctttcctttcctttcctttccttttaatctttcctttccttttaattccatttgtttaactgttttcttctttgaactttaacttattatagggtaaagatgatgtccgcaattagaactaacgttttcaaattaaacaattcagtaattagaacttcaattagaaataaggttactttacctgaattaaaatataaatttactgatttagaacctttcatttcagctgatttaaatactttacattatacaaaacatcatcaaacttatgttaatggtattaatgatgcattagaacaacatgcagctgcaaaagctgcaggtgatttaaagaaatgtgttgagttacaacaaaatattaaattccatggtggtggttatcaaaatcattgtctttattgggaaagtttagctccacaatctcaaggtggtggtaaattaccaaatgaaaattctgctttctataaggcagttattaatcaatatggttcatttgagaaattaattaaaattgcaaatactcaattagctggtgttcaaggttcaggttgggttttcatttgtaaaaatactaataatggtgcagttgaagttgttcaaagatataatcatgaaactgcttctggtcatttaaaacctttattagctttagatgcttgggaacatgcttattatttacaatataaaaatgttaaagttgaattcttttcagcaatttggaatgttattaactgggaatttgctgcaaagaaattcgatgcttaaatcttattggtttattgaaaattttattctatttaactttatttaacgaaattttataattataattatttataattaactattattattattattattcataaatacacatcatcatatacacacataaatttataaaacagctccaaatccaaatgttatcttaattgctctgaaatatttatccttaaaattattttcaactaattcttcttcaccaattggaactccattcatattaacattcattatagtttcactattaccttgatctaatgttattaaaattttaacataatgaccttctttccaactactaattctccatagcatttcaatttctttattttcaattaatttagttattttaccttcaattccacctccaaataacttaaattctgctccaactcttggttcaataccaattggtgcacttcttgtccacattgcaactctttcagggtttaataaagtaatatataattgttcagctgtagtattaaattctgtactaagatttaattttgcaatattatatttttgtgcatatgcaggtaatggagttgatgatttattagtttctgctgctttacttgatgatgattcactcttattaaatgttgtcttctctttaataactggtttcatataatttaaattttgattacccttagtaaaagttgacataacttgagaatcatcaacttgaatatcagatccatgaacattaattaatgttggaccaaaatcttctaaaatttttctaatttctttaattaatttacttctaattaataatcttgatttttcatcaattctatcatctaaattaaattgatattcatcaggttcggtatcatacataatttcaggaattgtaattgtacccttatgaccagttgatgattcataattaatagttaatgacatatcataaagagagataactttacccttacgttgacaaacttcacaatcacctgttaatgatttgactgatgttaaacttacagttgtatcattattttcatcattcactgataaattctttaatttttcatcaaaatatgcacgagcccaatcaatacaattcttatcaacccaatgccaattattaggattttgaacaaccattttaagttactttatctaagatctacacttgtagaaaagaagatagaaggatggaaagctgcatcaacatgaaaatttaagggcggctggttaaaatattcaaacttaacttggtcgctggaagtttctagaaagaagttttaatacattaaatgaatactttacttatacacacatacaactatttaaatggtacagtcatattaatatgaacagctttattttcagtaaataaatctaaggcataactacctaattctctaccaataccactcattttagaaccaccaaatggtacatgaatatcggaatcaccatttgaattgatgaaaaccataccagcctctaattttgatgcaactttatgagcttttgtaatattatttgaaaataatgcagctgctaaaccataagttgtatcattagccctttcaataacttcttcaacattattaaatttagtaattgcaacaacaggtccgaaaatttcttctttcataattctcatttcatccttacaatcaatgaaaatgaaaggtttacagaaataacctggaccatctaaaaattctctactaattaattttgcaccttcattttgaccaatttcaacataacttttaactttatcatattgtaatttagatactaatggaccaattgtacatttttcattaaaaggttcactaacaattgcagtttcatttgttaaatttttaaatttttcaataaatttatcataaattgaatcttgaatgaaaaatcttgaagttgaagtacaaacttcacctttattatagaaaataccaccaaatgcccattcaacagctaaatctaaatcacaatcatcgaaaactataaatggtgatttaccaccacattctaatgtaacttttttcaaatttgatgaaccagcactttccataattttttgacctgttgcagttgaaccagtaaatgcaattttagataattttggatgattaaccattgatgaaccaacatctttaccaaaacctgaaacaatatttaaaacaccttttggtaaacctgcctctaatgcaattttaccataccataaagcagataatggagttatttcacttgatttcataacaacagtacaaccagttgctaaagcaggagcaattttccatgccatcatcataaatgggaaattccaaggaacaataccaccaattgcacctaatggaattggttcaacataacaaattttatttttacctaaaacttgagaaccaattaacttgaccatgtttttttatcagaccaacctgcataatatttgaaaacttcataactttcaactaaatcaccattaagacattcattatgataaggtttaccattatcaattgattcaattgaagcaatttttgatgcatctcttttaataatttcatacattttatataaaatttcaccacgttcagaacctgttaaatcagaccattcagatgatttaaaggcatcatttgcagctttaacagctaaatcaacatgagattcatcggcttgataaattgaacaaattacttcttcagttgatggattaattgtttcaaaagttttatcagttttaacccattcattattaataaataaacctaaaggttgttcaagatcttcaccaagtggtgtagtaatagtagtaaataaatcagacattgtcatctgaaagaagtaaatattatttaaatattatatattcaatttaaatcatgtaaataaacgttatcttttatactctacacccttgaatttatactctccaagataagtaaatggatccggtcccttatcttatcaccgctaagaatctcgcctctaactgcctaatacggtcagttaagcggtatactatattacgtaataaccaaccattacgtaataattacataagcagtgattacgtaacaacatgatttttctaaaaatttgattttgattttgaaaccatcttgatgttgatgatgatgatgatgttgatgttgatggtgatcaattagtacttttctaccctcttatatactcttttatcggtaaatacagataaataacagcttatatacaattatgtcatcaaaggtacccacaaagatcaaaactttagatgaatcaaaggtaattgaacgaaagaaaccaataatatctgaaactataattgatacagattctcaaagatattatattttagccctatttatcttaattcaagcttggaaattatatgatctatatattatacatgcctatgatactctgaatacttcaaataatgaaataattccttcttcatatttatttggtttcttaaatccaaaaatttcattcattttcaaatatggtttctttgatagtttgttaatcttaataataccattccttaatatacctaaattaacattcactcctttattaagtataatattattatgttcaatcaattttttaacaatattattaacttgtaatttctcatttactttaacttcaattttcatttcattatatcgtgttttagtacctgaaaaggaattatcaattatggaaaaatatgttaatactgattcaattattaatcaatcggatcacttcaaggggaaaaaaatcattagatatgctccagattcttcaattaaaattaatcctttcagtcaacaattttgtattaatccaatttatggtgaaaaaattaaaataccaataagagttgattcaacttatgatttacaatttttacaattaaaatatttagattttagtaattctgaaactttatacaacttcactcaaaaagatttaagaaaatatgttgtttcagactactataattctccttacgtaaaatttgatccatctgttttagctgataataatgttaaaataattgaattaccagcagataatcccggttattactcaattaaaatggcaactgataaaaaggataaagttatacgttcatatagatcagatactataatacctctttgtcctgaagcttcattcattgttgaaaattccttcgtttcagataaatgtattgatgattcaattgatgatttgaaaatatctcttattggtgtccctccttttactttatattatgaagaagaaatcaatggtaaactatctaaattgcctcaaacaatcattgaaaatccattagatattaattcaccactaaattcaaatgataagaaaaacaacaagaaaattaattatccttcagaatttttaagtgatttaagttgggccaaaagtcaacaacttacaacttcaatctcaagaaagaaattacaaaaatcaggtaaatatatttacactattgatagaattgttgatggatttggtaatgtgatcaaatactctccagatcctcataataatgcctcatttgtctcatttgacactcatccagttccattacttaatcttgttgatactaatcaaaataaaccaattctcactagtgaagataaatatttgaatattgatatatcaaaagttgaatcatctcaattaagtaatgaaggcccatttgattttgtttttcaatatactaatgaaaattcatcagttgttgaaacatttaaccaatcatttgatttttcaaaagattcaaaatctaaaattaaagcattaaatccaggtaactataaaattttacaaggtaaaactaagtattgtccttgtaaaattggttcatcatcacttaacgttttatctgctaaaattccagaaatggaaataaatttagaaccaattgttgataattgtgttggtactataggatttaaatttaattttgattttgttggtagtcctccatttgaaatttcttataaaattgctaaacttgaccctaaaaattcaacacacgttttgaaggttgaaaagtatagttcactcaaatctgattcaactaccttagaatatgatttccaaccagctaatgaaggttcttattttattgaatttacaagtttgaatgataattattataaaaatcaagtgaaatttgatcaagaggaatataggtatattacttattttaaacaaaaaccaaaggcattcttcaataaaagagataaagttcaacgtttatcaagttgttttggtgagtctaagaatataactctttcctttgaaggtaaagctccatttaatgttacttataatattatttctcctgatttttcaactgaaactttcactctgaataatattatcgaagataaaatttatattcaaactcctgaattattaagaggtggtgaatatatcgttagtttgaaaaatgtgtccgattcaagtgattgtgatgttgatttcaaaggtcaagaagttcatattgatgttaaaaatgatatgcaagaattaagtttccaacaagaagaaatttttgaaattgttcagggttcaaatgttgttattccattaaaatcacaatctaatgaattaattgatttaatttattcctacactcctattgattcaactgattctactaatgttactcttaaaaaaattaatccatcagatggtatatctgttggaaaatctggtacttataaacttatttcctttaaacaaggtaattgtagaggtaacatctcaaatgactatacagttcaaataagacatagcccattacctactattcaaattgcatcaaatcaatcattattagtaaatgaatcttattttgttaaacaaaatatttgccaaaatcaaaatgattatattacagtagaggtatcaggtgttacaccttttattattaagtatgaaatagtaacatccaaatggtagaattgaaaaacttgttgaacaaattaataacaataaacttaatattgacctaaattcagaatcagcaggtgaatacacttatacaataaccggagtttttgattctgtttacactgaagaagtaatcaaagatttgaagggatcaaaatcatatgaatttgacaatataattttcaaaaataccgttacaagtttaccaagtggtagatttttggaaaatcatgaaaaaattcaatcttgtgtatcaatactgaatgatatcacgaaattaaccccaattaatgttgaactcgaaggtttaagacctttatctctatacgtcaatatttatcatgaacttaatggagagcttgaaaatgttgcatttgaaaacattgacacttcgttagtcgatcttttaagtatctacgattttctcagtattggatcacatacaattacaattaacaaagttgtagatgcaaatggttgtgtttcagatgaatctaaattattagaccaatcaataacctattcatattagtgatgttccaaagataagacacttgattgaagaatctaatcaattatctgattttgattctgaatctaatagtaattactattgtgttggagatcaaattacttatatgcttaatggtgcacctccattttcaattgactatggatttaatgatgaaattcaacatgttgaagtacaaggaaattatttcaaacgtagagcattgaaaccaggtcaatttaatattaaagcactatctgactcagtatctaaagaatgtatggttgattactcattgatgaataggaatgatctaaaggctgtaatttatgacttaccttctgtggagattgttcaaggtgatagtagttgaagaggatattcatgaaggtgaacaagttgaaattaaattcttattaactggtacaccaccatttaaattgacttatattcgtaaagaacttgatgattcatctaaaattgtggaaactgagatagctgatgaaattatggcaaatgaatatagaataatggcaaatcttgaaggtacttatgaagcaatagaaatccaagataagtattgtattgcaagaaaccatggattttaattgtgtaagtgaactatgtacaaatactgtagatttttagattttatttgaattattagataattagcgatctattgtgatagatacatgtattatacaattagcaaaaagtttagtgtattatttcaattgataaagattgaattcgtttaatactggtcgatcgttttctatacgataatcaacttggttatacaatgataatactccattgattatattctctgatggtatttttgaagaggccacccaaacttcatcatccaaaagtaattgttttcgatcaattttgtttatcgtgtaatcaatttcagcagtaacaatagtgttaaataatttctgtgataaatctgtgactctagataacctaaccttattcacctttggtttcattttcttggtttgtttttcatcaacacaataagttccaaatgatgatattttcatttgttttttagtatccgaatttttatcattagacttttgttgcaatggcaatagtttggcagctttaggaagctctttgctcttaactacatgaggctcataggcatcatctgataaatcacctacaaataaagtttcctcgtttgatctgtggatttcattggataacttggcagtggtccacggatttgcaattgatatatgtgatgggtttatattttcaatattttgtgagttatgtgaagattcttgaggaatatccatttctgatgatatacctgttgtatcatatatagttctagaccaattattatcatcttcttcttgatcgtgttgttccctttcagtgttggtatattcatttgtttctctagttagtgatgttttttcgttattataattatcgtaacttttattgctcttttgagattcagggtctgatgttacttcaatattaagcatttgacttatttcaggagtttcttgcactaaagtttgacagtcggaagtaacttctagatccatcaaaggtcccggacttgaattattttgatacgtttgagcaagtggaacagttcccatttcgatgttatcatcaaattttactggatgcgtattttgtattctttttatagtagagtccagctcttcaataaacgattcatcatcatctagcatatcgggaatgacattttcatcaatagtgcatattttatcgttgttatccttagcatcagtttcagttgattcaggttctagttgctcatcagtttcattttggatattatgtattttttgaaccaaaaaaattaaattatctttgaatcttactaagaagtttgattcattgactatgagaatatcagatttttcgggctcaatattaacatctatcttatctgttggaacttctacactgatgtaccaaacattcggggacaacaatttgttttccaaatatgcttctcctaccaactttgaaatttcttttccaaattttaaggataggtttaagggtctattattcactgtaagaactttcaacggcgttttgacattgggtatatcttgggctctcatttttggtaacacgcattctacattgacactgtaactactgcttatagaatcaccaacagtgaaattgatattttcatccgttaaccaatctttacttctaatttgtaaaatttgataaataaattgaagttctgggaattctgttgctgtatgagagagtatttagagtttttactttattaaggggtaaaagtttaatatatttaatttgaaatctaatagaagggtatattaacgcatatttagttatcaaactctcaatttctttgatgtacttggatttatgactttgtaaaaacttatatcttactggcgttgctttgaacaatccataaattttaacagttgtaccttgtaaacccgccgaagagataggagaactagtgacagttcctgaattagacactgaccaagtttctgacatcgcatccgaactggttctagtacttatcaccattgattcaactaattttgcaatcaaatttaaagcttcacctctaaatccacaggtgtctacaccactcatgagatcatcaacagagtgtagttttgaagttgtataattcagacacatcatatttctatcttccttattaacaccacatccatcatccttgactgatatgtaatccaatcctgcagagtctttgtctatttctatctgaatgttatgtattttcgtgtttttaacgccgccaatgggtgtattaattccgatggcgtcaattgcattttctaccaattccttcaccactgataattgtgattgaatcatactcgtggacacaatggcggcagatgctgcctttgggaggcgttggatcgtcatctgtatctaggtgtctggtgatgcactgctcgggcttctgtgtattgatcaaagtccaggaagaagttgtagtgccggaacacgaaactttttctttcgtgagcattttacaccaagtccgctaataacaactctccttctttaacttcaactcttagctcttgatcacatacacatagtacattacacataagaagaaacgccttttcttagacacggtacaattatgaacatagatattaaaaaactcattaagtttgttggtcctggtcttttggtttcatgtgcctatatagaccccggtaattactctacatcaacagcggccggtgcacaattccattattcacatttatttatcatattactatcaaatgtatttgcagtgatacttcaatgtctctgtattaagttaggtactgtgacaggattagatttagcagagaattgtagaaagcatcttccaccttggctcaatttcattaactatattcttgccgaaatagcagtaattttcactgatttggctgaagttgttggtagtgctattgcttttaacattctttttaatatacctttgaaatggggtgttattttaacaattttagatgttttagctatcatatttgcctataatccagatgggtccatgagacatatcagaaaatttgaaatcttcgtatcttttttagttcttatgacgtttttctgttttgttcttttattagataaggtgcatgttgaatcaaagctagaagtattgaaaggtttcattccttctaaaattattttcaaagaaaaaagtgcaatttacttaagtttaggaattatcggagctactgttatgccacattcattgtatttaggatcaaatttagtaaaacctagattgagggaatttgatattaatgctggaacttatcactgtgaaatgaattacgatggtgttttatctcacaaaccaactttaagcgcaatcaattattgcttgaactattcatatatcgaattgatattatcattatgtattgttgctgttttcatcaattcatcaattttaattgtttctgcagctgcattatatggtaaaccaggagcagaagatgccgatcttctttcaatatatgatatgctttgtaactttatttcaaagcaagcaggattgatttttgcattggctatgtttttctctgcaattgcagcaggtgttatatgtacaatgtcaggtatggtcattgctgaaggtagtgtcaaatggtcaataaacccattttatagaagattgatcacaagaaccataagtataattccttgtctgtttatggctcttttctccggaagatctggcgttgcaaaaatcttaaatctatcccaagttgttctttctttgatactaccttttgttacagcacctttgctttatttcactgcaactagagaatatatgaccgttgaaatagatacacatgaaattacagagcagaatgatgaatctgcaagcgaagctactcctttagttgacaatggatctggtttcaagactgtcgatttttccaattctaacattacaaatatccttgggtttttgtcctggttcataataggatttttaaatatttatttaataattcaatggatcaaaggagaagatattcacttttaatgctcatattgtaacgtttgagcttattcaaatccttttcaaatattaatgtttcttttttattaattaataatacattatacataacatacacagttcataattttaagtttttatttaaaccattaaatcacaaacttgccatataggcatcatatttttatagtttataaatttgtgacatcttcaacatcagctttaacagtatcgtctttatcttcttcaattttatcataatcgtcatcttcatcttcagcttttcctgtatcatttgtagtatctttatcgtcttcatcatcctttccagtatcgtctttaatatctttattatcttcaacatcaatatcatcattgttatctttatcatccaactcagaagtttttagagcagctacctcatcggattgagtcttagcttcagtatttgcgttatgattatctttagtaataacactttcatcttctggaactttactctcttcttttggttcttcttctggtttctcttcaatctttggagcagataatttactcaatatttcagataacctttggtcatttttatcctggttctcaacaaaaaaggtatttgaaataaattttttcttgatttgggtgattttaccattaggtggaaccttaggtctattatttctttgcttttgtggtaaatcttcatcttccactaattctaagtactcctcatctgtaacttcacggaaattttcgtccacaggttctccattttgcttttgaacttgatatttctttaactgcttaccatacattattttagttttaaataaaagatcatcataaaatggaagtaataaaccaatttgtgaaggaatatcctttttcatcaactttggaaatttaacctcatcaaaatcttcataaattcttttagacatactcttattcatttgattaaattgatgcgataattttgattgtaataaatgtaatggaatatttgaagtcaacataccaaattctttatctaaacctaactctttgaaaccaaagaaatcatcaccaatttcatttgaaaactcaccattaacaaattgttctgagtcatcattaaactgtgtttcactcaactcttgcatgcttggacgtaataaatcacataaaaagttttctaaaccgcatttaagatcgagcaactttttgttttgtttaacgagttgttctttataatatgagtaaataacatccggtttctctataccattatagttcaaaacaatttggaatacttcacggcatgttaaaggttgatggcctttaataggaattttgttgattgatttagactccaattgttgtttgatagaccttcctaaattctccatgtacacttctgcaacttccgttaaaagagacatacatgattgtgaagtttgttcaaaaccgttcagcatcactaatgcagaaacggattttttgagtgacgcagaagcaacttcctctgtcatcaaatctcttgttcctaactttgacattggatcaatatcatcaaatctgattctaggatatgttggagcaacaaattgtgatttgtgaataaattgtgtagtttgcatagttctaattaaattaattttgaaacaaactcttctgatgtcttgcatcaaggaaatattttctaatattaaactgtttgaaccttttaatttgaccttgaaatctgtatctggtaaatcattcaaagatttaccattctcaatcatatcttccaataatttatcctcaagtttgtcaaaatccagattttgatgtttgatagctgggacaccacttgtcacatcatattcaattaagtatggatcatcattttcatcaaaatacttacgatttctatgtaaaactactttgttttcatcttctagatatttcgagaagttgtacatttgagtcttagttctaactgatgcttcagcatttggttgaattttattatccttgaacaaactggatctttgattacaaagtttgtatcttgtacttgaagtcaacattttccatgttgaaatttcaagatcatcggtatcatcatttatttcctcaatattcatagtcattcgtttttcatcttcaatatcattttcttcgacatcatttctatcttcttcttcatcttcatttacttcttcctcaacatttgtttcagcaacaattttctcagtaccatcaccattattaattgcaccattagcagttttatttttatcatccaactgttgtatgttttcactggaatctgctgcatggtccgttgctttagaatcagtggtttgctctgtagctgatgttgtttcagtggtctctgaaatgacacttccgtcatcattgattaaaactgaagaagtaccttttcttccttttttagattttgattgagttactcctcttgtcgaagttcgtcccgaagtgacgacattattttcattattagaaccttccttttctttctctttttctttctccttcagctctaattccgcagcttctttttcaacttctgccctgtctctaatgacaatatccggaattaatggaatcaataataatgttttctttctcattgcaagagcatcaactctcagaaaatgtttaggatctgaattgtaagttaaacaattttgccaaataagcatcaaatcatcaacaaactctgtcttattttggtactgcaatgttttcaacttttttaaaacggtattcaagtccattggctttttgataatttgatagtaatttggtgcttctcttttggagactttgttcaagaatggagtagaatgttctgtataacttcttagttctgtaaccaccttctcgcaagcttcataaagctcttcttgaccaattctatcataattagcccatttagatctgttttttctgacatccattatcaagtttttcaactctacatcagtaacacccagttgatctctgttatcatcaatcttcttaagtaaatttttcagtgataagtttgcagctccacccagagacatcaatttactcacttgtttagaatctgaatcctcagcaacgtcatgagtttcacctgtatcagcatcttccagtaacttcagctgttgatcacttctctcaagctttctttttttcagtatgtttggtagatcattttcaaaactgtgatataatttgttaaaatttttcattaatttgagttcattttgcttttcgatagttgattcaatagcagacgaagtacctaaaatcggatgcaccatttgtcctactgcaacttcatcttcggttatctcagaaacacttggatattcaggtttttccaaaagttcagccttacttactattaaaattgtatcttttgttattggatcaatagtcaggcttttggttgaatcatttgaatctgatgaagtttcttttttatcatcattagtttcttccatttgtacatctccatcttcatctttgtttttatcgttttcattatcactttcctcatcttcgtcataattatcatcttcgtcatcattatcattagttttattctgtttatatattgccatggtactgctagatacatcattgttttcactaccaccatttccatcggtaatttgtttctccgcttcagtcaaagtatcttctaaaagacgaaattctgtaagtatgcctttatcatcagtataaaagtaatcaattgccttttcatataaaagatatcgtattgttgcatttaagtttctaagagttggataccctggtttcatatacatattttcattagaattactatcatcaccatcatcttctgtaaaacgaagaatcaaagatcctttcataaaatccgaccaaagtttcatttctagttctttatttttataatttggatataatatggtcttcagtagattaaactgttgtggtgttagaaaacaattgaaaaaacctgtttggtatagttctttggcgaaatttagtagctgttgatcatttcctgttttgaaagcatccaatgctctttttcttttcatggagggcataatatcttttataaatacctgtctctacgagagtattgtttctttaaagatgcactgaacacgtgaagagaaactacccagagatgatgattaatactactacaatttctttgagttgtgtacataatagaagattgaaattttgaaatttattacctaatacacttcatcacagtaatttatcctgtttttaaaagcattaaaggttatatgacattgggcttactgcttcttccttcaagggttgttctaattactttgtcatcatagagataactataaaacaagggatataccaactataaggaaataagacatgcctgattttgtagatcaagttttcggttatacatcgggcactattgaaaaggcttcatcaatacttcaatccagttacgatgtttctaaaagtgcattacaatattcatacgatacttctaaaggtgtaggtggtgttttatggaatggtacaaaaggtgcttatagtacaattcaaaattcaataccagagaatctatttgataaaatctcctcacaaatatacggtcgtaataaaactgctatcaaacctgaagatataactgtatcaggtttattatatcacaatctttcaaattatgttattcaaaataggaaagcaattggtatttgcttaactttaccaacaattggtgttactgcattccaattttacagattatttgttccttatcaaagaattgctcaaagattgaataatagatatcgttatgaagtcatccttgttatcggtaacatgaattcaacatttgtttccaaattggttttcgatctgaataatagaggttatgttgtttttgtcactgttactgatgaggaacaacttgcactggttgaacatatcaatgatcctgatattagaccattgatgatggactacactgatgataatactgtcaaaaatgggttattaaaattaggtaactttttggataacaaaattgattgtgctcaagatgattcatattacaacttcaaaggtattctttttattcccgactactccaagctaccgaagatgaaaaagcttgaagatataaatacaaaggagttcaaaagaattaccgaaacttatttttcaagatttaatgctctacttcataatggcttactcaaatttatcaaagaaagtaacaacagaagagagatagttgagagtagtaatggccaaaaagtcaaaggtggttttgcaaaattactgtttatcaattttatggttgacaataataatgataacagaaaaataattcataaacttgcatatgatatcaataaaagtttgtttaatacattataccaaagtgaagctgtcacttttaaggatgcttgtttaagatttattaatcaatccacaaataaatccttgattgatatggccaatttagacatcgtattacacaagaattctaaatctacaatgattccaaactatccaatattggatatgttttcttctttaactttttcaaaaatgactcctaaagatattcaccataaaatttatgatctattaaattccgaatatttgagcaagacatataatatggaaggttagttattgcataatgtttttttgttatgattattggttgggtttgtatcttctttttatacatattttttttaatttaatgaattttgtccaaataaatgaataaacgaatgttcaataatgttactattactatacatttgactaattattacataactatgcgattattttacatcttgtaactgtgtgatcttccaccgtgccagcggtgaaatcagcaatgctcaaaataccttttctatctaaggcatataacttgtatccatcaacatcaaaccttatagatgcagattcctttactcttgatgcaccagaaacatcaaaaacatttacaacatgtttattatcattatcatccattctcggagttgtcatgatgtatacattcccccttctatttagaaacaccacactatctcctcttggagaaacacaacatttatgaattgttgatcccacttcatctattttgagcaataacttaggtttagcaatcccatcaggtccagagattgaatcaatattagaatcaattataataggttctgaattatgtgaggatgaagtgattgacattattctattatcaggaaaaaaacaaatgtcagtaataccttcactatccaatgaagtatctaatctacgttgagacttcatcactaatgttggtttggaaggatcaactaggctgattactaaaaacctagattctagaactgtagctactgataacaaacttgaatcagatgaaaacttcagtattccaattgggtctctatatggtaaagagaatggtaacgtaattatttgaaatgatgattttaaagtttcaggtatcaatttgagtaatatgataactgattgttccatttcagtatatttatcctttcctgtaatacctaaagcaactatattcttcatttggtgataagtctaagcatctgattggaaaattgcacttatatgtgaaaacacatcttccattttgatttaaatctataatacgcaagagcccttttgttcctgaaataatcaataggttttcagataatcgacaatataaatgctcccaattctctaatgaactgaaataactggtatttgtagtggcattcttgctattgttgtcagaagtatacgttaaaattagagttaagtaagatatgctccttcttcattttttttaaatgatcaaaatctggtccataggaatgcatcggatttcccacaacaaagtaatgttggtgctttgttcggtgtgtccgtatctattgaataaacttcccatttcttttcattcaaaagcacaagtttcgttatatttggtgatattcccgtttgaatgtataattttgtttttagaagtatattattactatgaagattgaaattataagtttttctgaaaaatgggaagtttttagataataataattccttatttctcagattgctcttttcaaaactaaactttttggaaatgacatcatcactattgtttgctgtgttgttaaaaccattcactttcttgttttgggtctcattttcattattagtttgattagaatttttcacaccaagattttgagtggatgttctactaaacattccattttcactgctacccaatgaattattaatcgtgtgtgatgctggtatattgttgcctgatgaagaagtggataataatctagtgagattagagctattttgataagaatgttttgttctttgtttatgtaatgatcccaacgaagatataactgaagtgtccgtgggtgattggacatgatcttgggtgttataactattattattgtgaagttcctcaaagtgattatcacgtggagagtggttgcttggaataatagataatcttttagtttcattcgactccacagaagatgaattttccacttcaatcagtgcttcattgaatgcagttaaaaaggagaaattttgaggttgtgattgtatctgtttaaaaggtttcttattactgtgagtttgttgtaagtgtttgccttgaaaggaattttttcgttgtttttctgagcttagtttggaaaacattgaagaaatatctgtaatatctctatctgtaggtgtagtaatatttgttgatccaattccatcagaatttttgaaaattctgaattcatcacctaatttggtccaataaatatataaatttttcatattcagtagcattaccaatgattttagtatctgccttctcacaaagaggacatttgaaaacactgtcgttatcaaatgggttcccgttagtaaatggtgtggttttattggcattggataaaccatttttcatttgtatttttagtgtatctattaaatttcgtgatattatgcatccacaactaagtgtacatggatcatttactggtgcataagcaattgttggtggataatttgcataatcataataagcaggaattgataaaagaattttcaaatgattaaaaatatcctttggagtgacatttggtatattagtatcattcattgatgatttatttgaagcataaatatattagaaagttatgattcagtttagtttgagttatttgaagtttgtgataaaacagagtgtataatcttggtgatgaaatcggatggtatataggtaggccttacaaacttgtttcaaaatcaatgatgtgtgagaaatttgaacagtggacgtcttttttaaaatcgattgcaatagtccatttgggtgacttttctttcttttggtttataagttcacaaccagatatgtctcaatttcaagggtatactgtcgacatttctcttaaaggacaggacgggagaacaattagaggaattattagcaatattgtcaatagagatataactttgaaaaatccagtttatgttaaatcagacggctcatatgagaaagctaatgcagagagaattacattaccagcagatactattgctgacttgaatgttattgaattagcaaaagagagtaaacaaagtcgtagatcaaagaaatcaggtaaaaacgaacaaaatgataacaatattaaagaaaatacagaggaaaaaacaagaaaatcaaagggaaaagctaatggtaatgccaagtgttaatggtgatgtcaatggaaatggtaatgaaaaatttgatgctccaatggttaccaaatatgttgatatttacaatgaaaagccgaagagagttgactcacaatccaaaaaatcaatacagttagaggaattcgattttgcatctaatttagaaaaatttgacaaacaatccgttttcaaatcaatttcagaaagtgataatgttgagcaaagtgacagattagtcagctttaataaggttgataatgttagaaaaggtaaatctgataactatgacaatagtgaaatggttcttaagaaaaaatctgatgctggatgggatgacaataacgaatataattattctaatgttgttggttcctcggcaaattctaaagtatctggtaattcttttccatcatccaaatctgataatataagcaaggattctttgaacagtagacaaacatccaatatttcattagaaaacaatagaaaggcatcaataacatcaacatttgctcaatttcacagtaaatcacacggtgaggcaccaattccaacctgttccacattacaattatctgaaattttccacttatgtaatagcaaatttgatattgataatagaatattgattgaaaattcatctagaagtatatgtgatgtaattatcaatagagttattggaaatttccgtatcagtcttaagaaccataatgaaccaccagttattttagctgtagttggaaataataaggccggtgcgaatttcaatagccactgcaagacaattatttaatagagggtttaaacttgttttatacctcctctatgattctgaaaattcacaagatgaattattgaacatagttgatcaagaattgaaaagatacagtaactttggtggtaaaatagttactaaattatcacaattaaatcaaattttacatgaagttgaaaaaaatccgttagaattgatactggacggtttacaaggttttgataatgatattaatgaattagaggatgtagaattgaaacaagcaagtgagctcattaattggtgtaatgatagtaaggttccaattatgtctatagatattccaactggattaaacccatcatctggtacatttgaaggtgaagaggacagtatgattatcaatagtaaatatgtcgtttctattggattggcattatcatccacattaaacatgtacaaatttggatattttgagaagggacaagttggtcatttcttaattgaatgtggaattccacgtcgtttatttggaagcaagggaacacttcgcagatttgatcgtagatggtttgcagagaccagcagcattgatctcaatgtagcttaaatagattgaaatatagattgaatattagaaaattacgtaactctttgaaagaccttaacagacctctcttactttaaatttatagcttttatttttaagcgccgacaatcaaagtttcataattaattgaaattggcaatttgttgcttatcaattactgcatttaagaaggttttattgataggttacattgaccatattaagtgaaataaaagaataatgactgaaagtgaacagatagatcagctagtacaaacaagtcggattgtttatactcctgagatattattagaattaaaacaatatgcagtacttccctctgattgcactttaccagacaaagaattttatagatttcattcatcagcttcagagtcattgaaaatggcaaactatatacgcaatttgaagaacccaaactttagggcaaagcataagttgaattcagggtcaaatagtaaagaaggtaaatttcgtagtcataatagtcataataatcataatcattatggaaatgatgagtcattggaagaagatgaacaacctgcttggttaaaggaaacagatttcaaagttgatcatagttttgaaagatatatgatctcaggaacgcatacagctgatgatttggaaaaagagaagctaatgtttcactctgctcataaatctaaaggtaaaagacatacatctaataattcacattcatattcagaaaaaatagaggataatgttacagagaatagttttaatgatagtgcaactattgataacgttcacgagggtgaattgggtaatatagtgaatgatactgattctagtaataaaagtaataatagtggtaataactataatctggaacttgaactggagaaacaatttcaagatcctgaaattttggggcctacagaagaagaatattttgaatctttgaaaaaacaagaggaagaaaagcaaaagaaacaagaagaagatgcactcaatagtcaatctaagaagacaagttcagtagattcagatttccaatttgctatggaacttgtttctaaaaaggagattgataactcttttttcaactctttaattcaaaaaagtaccgataattctaaatcaaactctggatctgaatctgccatgaaatccaataatgcattaacaggatcatttgaatctgctcctgcaagcttatcacaatctggtaattttaatacacttaatcaaaatatgacctctaataatacaactcttcaaaatactcctcaaaatatgctacctccaggattatccgtgcagcaaatgcaacagatgaaacaattacatatgaatcaattacatcaaatgtcactagcccaacagaattctgcaacccgtccacaatcaagtgattctaactctaatagtattatgaatcctccaatgggcacaccaaatagctttccaccaggaatgttacctaactttcctaatgcaaacaatttacctccacatgtgctacagcatttactgcaacaacaatcaaacaataatttcccaccagggttcttacaaaacctacaacaacaacagcaacaacagcaacaacagcaacaccagcacggtcaacaacaaagtcaagatcaaaatcaacaacatcaacagaatcctcaacagcaccaaaatcaacaaatacagcaacaaacttcagctcatactgatcatatgactggtcaagggttgcaaaatgctcagaatatgcaatttccaccgggaatgggaatgggaatgagaaacggtatgaatccaaatatgattttgaataacaatatgaaccataatatgaataacataaatccaaatgtgaacccaaatatgaggtttcctcctggtatgcataataacttaacaaatacagggtccataggtatgacaatgcctccggggatgattccaccaccaggaatgatgccccctcaaggtatgatgcctccaccgggtatgatgatgcaacctcctggtcaaattccacaaagattcccatcaaacttaccgccacctgatcaattaccatcaccttttaaggagaaatttttaaatatacagagactgttgttacatttccaacaaaatggacaaactccgccacctcctttagtaaaagaaatgatggaatttcacagattacttgaagctaagtttggtaataatcaagaatctaatttaccttaattgtatatcgattttagaagtgtaatatctttaatacggaaattaggttacaacttgttaaactcagataatagagtacgaactccctaataaaataatttgtgagtgttgatatttttttttttcatgcacacatttgattgaattttttttctaactgtaatatatttttcctactttggattaactctgttgtaaataaagtacaaacgttagtcctatttattttcttcccatatttagtataaagatgaaaattatacagcaccaggataaattgatttcaaattttgaagcatatcaacatgtagtttcaatccaaaaaaagaacgattgggggttcacaatccctccacctgaaaagaaacgtcgaggtaaatttaacccacaattacttgatcttgaaatcattacccgtgatttgagtcaatatttagttaaagtgaatcaaacaaatgaaagtacacaagaaagttttgttggtttaatgttagtgctaaacacatatgaaattgaagttatagaaaaattaatgattatgaacttactacctcgttcacttgtgaatttatatgctataattgaagaatgtgaagacagatttactcaagaacaatgtgaagatatcttagcaaatgttgagaaattctatccagctcctcaggtcgatgatgaagaggctgaaggtcaagaggaaatggatgttgatgaagaagaacaagtggaagaagaagaagaggaagaggacgaagaagcatttgttcaagatgatggtttagaacacgaaggttatgtaaagaagaaccaagataaagaaattgatgaagttgatagttaacgagcttactttaatttcttatgcagttttttaaataattataaacggtatacttgtaatgtacttctcggtaaagaaataatactaatgtaacgctatatacatataagatgtataaatttatagagaatattttccaaatataatgctagaacaagtttagtatgtcatcatttccaggttttttatttgaagaatctgaattttggaaaggagctggtgtaggtgaaggtgatgcagttgcactatcaaatccacccaaaatgcttaaaagattattacttgcagccgatgatgaattatttgtagtaccggaagttgtatttaaaccagaaaatagatcatttaattcgtttaaaatatcaccactgttatcccctccaagaaggccacctgcgttgttatcttcatcatcttcgttgttatcatcatcatctaagtctaacaaattatctgctttaactgcattactgacaatcttcgttctttgcaatttgttgaagttcctctaattttttgttctgtaactcagatgatgtgaagaatgaatcagatccatctaatttaataaatgatgatgcaggtttataaaatactgaaccttaagtttcctagatcgttgactaattcttctaaaagtcctggtgtgaatgtttcaattgctgaatttaagattggtaatttagcaagtatgatttcttcttgtagctttctgtcatcagttgaaagtaatctccagtataaatatgccttatctctaacgtccacattttcaacatcctgtgttgctttattcaaaatagtttgtaacaagtgtggagtatttggtgttggtctcgataaacttattttaacaactaatgataaagcagcagattgcacagttgactcaaattcatcaaaattttcaacctatcacattcaatttatcttctaaatgtggtatttctcttgggtattcacttaaaatccacatatatgatgttaatgattcggatctatttaaatcgtcaaatctcaaatctgcaataacagtaatgacgttggaaatgtactcagttgggtatcttcttaaaatattttgaataaccaccacaatctcttcaacaacaaattcatctttattgataaataattcatataaaatttcaactgcttttttagaacatttttgaattttaacagcaatttgtccaataccttgtattgctctgttaactaaatcgatatcaaactccattgaatattctcttaattctgatagtaataacatgcagttttcttcatttgctattcttgtcatcagttcaattttttcaagtttcaaatatagaggatcgttgtatttaataaagaaagcccttaattctttatccaaaatagttggatatttttcaagtaaaattctaatattttttagtgcaacaaattgaatttctggggatgtgttcaatagagagcataaaggacttgataatctgttcaaaacattgttactttcatttgaaggtaacttatttaattgttttattaaaactttaatggtagataaaacaacagctggattttcatgttgtaattgaggagaaattttttcaattatattatgaacatcacttaaattattggcatcatactccaataatgatgacaatatagaaactctaccccattcactacactcattcaatgttgataataatttattcaatatttgatcatcaattttaaaaacatttttctgagttttctttgatatttccaatagagcagcaacagaattagcaacaaccatctgatttgaatcttcaactagttccaataaatattctaggaaaccttgttccatacaaactgttggattcaattcaaataattttgcaacacaaataacagcagttttacgaacataaggattatcatcctttaaagttcttttcaatggaatagccatataatctaccattttatcaactctaatacaccccattgttctaattgctaaagatctaatcaatggatttggatcttcagtatctcgtataaatgtatttgttgcaagtataactaattcagggtgagtcttggcataattcattaaataaaggtacactagttttttctgttccaagtcatgagttgcaatattctttaaaacatcaggaaataatgcagaaacatcttttccggttgtcattgccgcaatcacacgttgtattgtatcctttctctcatcagcgtattgtgaaacaagacccgatctgaactcatagttttcacccttcttaggaatattaaaaaacttcctgaatttcctttctatgatctttgatgtcattgtaatttgaagatgggctgatcagggaggagagattcacaagagaaaaagaagatgtatcaaagcatccataatgaagatctgctaacaaaacaatctcgaattaaatttcactaacagtggtggtttacataattttcattcacagaatcattaattggagattttaaatacttatatcacttttccaaccagctaattacttgcaaatgccaattgatctacaactccatagagttcagaagcttttgaaacttctagggaatccacatcatcatccaaaattcattcatattgcaggtacaaatggtaagggatcagtatgtgcttatatttcacatgctctaacagcatctgggatacgtaatgggaggtttaactcaccacatttggtaactcctcgtgactctattcaatgtgataatcatccagtaagtgaatatatttacaatacaagtaaagctcatgttcaaaagacaaatgatgaattcaatataggatgtacagattttgaacttttaacctgtacagcatttgaaattttcagtagattaactgtaccaattgctattttagaagtcggtgtaggaggtagaatggatgctactaatgtcatacctgcagaatctacacttgcagttggtataacaaaaattggacttgatcatcaagggttattaggtaatacgattgcagaaattgcatatcaaaaagttggtatctttaaagaaaatgttccagctatcattgatggaacaaatagtgaaattgttttagaagttgctagaaaggaagcttcaaaactgaatagtcaattgattattgcaaacagagctgataatgatgaaaatttggaacctggtctgttaggtgattatcaacttgataatgtatcagttgctgttcaaatcttgaaaaatattaaagacagtagaataacggatgagagtataaaaaaggggatcaaagatacaaagtggccgggtaggctacaattgtacaatttccaattgaaaaaacttgataaatataagaataatgatgataaagctataaaaatggtattagatggtgcccataacacacaggcagctatagaattgggtaaatgtttgaatgatatgcgaaatgattttaaatcatttgtttttgtaataggtataacaaaggggaaagatgttagtgaattgtttaataaacttattacaccaaacgatactgtcatttttacacaattcaataaaaatatagaaggaatgccatggattgaaccaactgatgcacaagaactttcaaatgaactaaaagcacagaaggttgattgtcagaacaatattgctatctccaatgttaatgatgctttgataaaagcgattgagatatctgataaaactggaggtagaattgtcgtttgtgggagtttatatttagttgccgatattcttaggttataaaatatttttttctttcttggtttgatagatagtgtattatagaacgtttaatataaaaggagtgtatatagttagataattgagacgattcatatttaaatgagtgtaaaatagttgaaaaataattcaggatatagtaaatcattcggtttccttaataggtttacctttttgtacacgtctgacatttttagaccattttttaatatcagacttgtattttgagcttatgtgtattttatcatcatccaagaaatccgaaagaaatggatgagacattaaactccaaggacttgatctttgattctctttctttaaacagagagaaataaaatcacaaagttcttcactataaccttcttttgttgataaacttggaggtttctcattaacaattctttgtaatagttctaaaattgaagttgaagaagaattattatcattagcaaatgctaaatttcctgatgctaattcatagagcataatacctaatgaccaaacatcacccttgacagaataaacaccaccttgaattctctctggtgacatgtaagttgaagtacccacaaatgtatcagctaatgaatttattaattcacgagacacaccaaaatcacataatttaactctaccctttgatgtcagcaatacatttgaaggtttcacatctctgtggataattctatgattatcatataagtaaatcaaacctgataaaacggaatatgctacatgtttaagcataaattcagggaaagaacctgtaattttgaaaacatgtgcaagagaaccacaatctgcatattccatacaaattacaacatttccttcatttaaaaatgtaccataaaaatcaatgatgaaaggagaattacattcatgcataattcttaattccctcaaaatttgtgattgaataacttcctttgcctcaagatgaacagttttacgtgccattgtcttttgtgatggtaaatgtaaaacttttgaaacagtacctgattgaccagaatcctagttttttcaaactgactaattcatctgcacgtattgacatttgatattctaatccaagttctaaattccttatattttcaattaattcatctgcatctatacgtctctcaggatctttaacatttaataacggagaattgggtatttcagaattcccaatatttgtatttattggatctaatgttaattttttagcattacgtctattcattgatcttaatggaatttctgaatcgatactatcactactactattaaatttatttgatttactactcataagtctagtagatatcatatttgaatcagattgttgaactataacgacatttgaattatttcttgtagatgatggcctatatggagttctaattggagttcctggtgtcattgtttcgttatcagttaataaaaatgcatcatctgctgaacttgctgagaattgaagaggatcatcagtgaaatttctataactttccatatttgtattattattccgtatatttagactcaattcgggaccttttcttcttaatgaaagggatggtggttcactattcatatttttaatcctttggctggataatgattcatttgacatgtgtatagtttgaggttgcttaaaagaaagtgacggcatttcaggtaacttcttatttgcgctagccatgatcaattattattctactattaattagaatgagaataatcaagtgatgaacagatattgatgattataataatataaaattgcaaacctataatttaaaacaagaaacctcttgatatactttcccacaaactttaaaatgtgttttaagttgactggaaaaaagaaagacatgcgcgtaacccatagaatagaatgggaaaattgtattacaactgtaagtgtttcatgggatcttcttttctgggaattttgggttgtatcttgaagggatcaagggtaagctataggggtaattttagagttggatatatatcaagaatgaaagaggttcaatatggtttgaatgataaagtttatgttttccagggtccaatgctttatgatgcacgaatttgtcgaacttttgatccaataacgcaaaaagttcactattatgatgaaaaaagacgtgaagatatgtatgtatcacctgataaaaaatttccgactgaaatgctgacagagaaatgttatatggttcattattcaggatggaatgttaaatgggatgaatgggtattaactgatagaattaaggaagttaataatgaaaatacaatgttaaaggaaactattcaaaatgaaatacgagagcaagaacgtcatcaacgtgaattagagaaggagaaagagaaggaaaggttaaatgcgaagaataaggggaaatctaagtccaatggtaagacaaatggcgttaatggtaaaggtaaaaccaaggaagggagtaaaatcaaagaaaatggaaaaaagcaaagtttgacattaacgttgcataagcctaacgataataaaaaacgtagtatagagagtaatggtggtggtgctcccatggttagtaatggttccaaacgtgctaaaagtgaagataatgcagacgaaaatgggaatatatctttagttgaacttataaataaaaataaagtcaaaagaaatagcagtgagcaaacacattatgaagctaaaaatagatttacatctcatgaaataaaaacattagtacctgatagcttgaaaatcatattagttgatgattgggaaaatataacaaagaataataaaattgcatcaatcctcgaagataaaactacaaatttaaatgtttcgatcgtattggaagattttaaaaaatatcttcaatccgaatttaacgatgttaatgaactccccattttaattgaactaacagaatctattaaattatattttgatcaatgtattggatgtttcttattatatcgatatgagagaccacaatttaatgaattaattagtaaagttgattcaaatattgaattaactaaaatatatcaaccgatatttttattacgattgttatcaataatgccaagtatattaatgatgaatgaagtggatcaatcagttatacgaatgagtaaaatctatttggaaataatcttaacttggttagaaagtaaaaaggatgaatatttaaaaactgaatatgaaaatcaagcaccttgggtatcaataatgcatggatgagatgaaagtatttacaatgtctaataatttatttatatttttttttataaataatgttacaaaagcataaaacgattaacttgtttgatttcatatataaacgatatcatcaacaactttcctctgcatactattaagcattttatcaatttctttttggaatgatactagataatcactacttctaatttgattattttgtgaaagtgaattatttgaaccttgtgatgaatcactactaactctatgtgatgtgaaaactgatgatgaagagtttagtgatgaagaagattgaattcttttattaactaaaggttttgtttcattaaatttaatcgttgaaatcggtcttggttgatgatttcttttcaaattatgtgtactcaaataagtttgatccatacataataaattatgaaaatttgaagtataatcaatttcaacaatctgtttatttgatgctttaaaagataatggagactctaattctgaattatatctagttaaattaccatttgattcaccaacccataattgattaccaagccatttagttgatgtaattgagatatgagaattatttattgttttcaaaggtttatttttacgaatatcccataaaagtactgagtctttaatgggatcaattgcagataataaatattcgttatcatcacaccattgaacatttgttaaacctgagctcaattttgaatttgagaataagatattctgatcattaccttttaaatctaataatctaataccaaaatcaccaccaattgctataagtgattgtaaatttgaatttagtgaaacgcttgaagtattattagtttgtaatattcttaatggagaatgagatcgtgaactatcccaaagaaataaatgatgatcataaagtgaaactaatgaattaaaaggaattgaagaccaagaatttggagttaattggatttccgaaattgttgttgataaatgaccgttatttaaacgtagtgaatgtgataatgatgagtttagtttatttatttttttcctatgattaaaccttttaataatttcagcatctttaaatactgaattttcatttaatggtatagcagataaatgaataataccatttgaatgacctgataataagaatttaaaattattatctccttgatctgttggttttaaaaactgtaatttatgaacatctggtagagttattgaagataaatgaatgagagaatttgcaacaaattgatatactttcaaattttcagttagtgaatttgagccgactataattatatcattatgtttagaaaaggcgacatttgaagctgtatttgatgtagatgtttcccagtaatttgagttaatatttgatggcattgttaaattgaatacgattggagaattgaaaaaatttgtggttttatttatttaaaagagtgactgttagttagtaatgtacaatgtttgtacaaaatatttgtataatattgtctaaatgattgaatgaatgagtgaatgaatgaatatatgtagttggtaataatatgagcctttgaacagatcaaagggagctaaataattgacgaggtcttgagcgtgtaacgtgtatttgtttgttattgaccaataactaagcgccgtctaattaaacaaagaagaataatatagagttgataaacgaggaagacgttgcattttataaacaatttgaacaggggggtaaagtttgtgtaaattgataagaatttattttccagcctttagcaattgcacgatctcaaaacaaagagattttgactggaaatacaatagggaaaaataactaaaaattatgaatagtaaaattaaagttgagcctccagattacctaattgggttaattaattatccagccacctataaatgacaataaaagttagtaaaaaatagcatgataagaagatagagttttagaaagtttaaatagggacattgtaagcatgtgtttcttgttaattcataataatagttgttagtttaccgatgataatagactaaattcccatgataaacaacattcataaattatcctatatgtattgtttaatgtccattgatcatctcagtaaagtgaaaaatatcatgaaaaaaaaatgaaaaataaaaataaacacagtcgcgactacagaaaagcggtgcaccggtttaatttaataaaatttagtcattgttagtattaatacttagtaaagataaatttatttttcaattggctctctttatttaatattaatacaataactaggctggcgccactctatattctgtttagaaatgctttgtttcttggatttcctttaaattattgtcttttatttgtaattgtttctttgtatctgtatccaggaattgtatcaatatatcatatataaggtaaatacagacatttcaccttataatcatattttcccttattagattcccttcacagattcacacgattttatttattagattcaaattaaataattagatagatccacatatattgattattaacaaataatgtcccgttctaaaattaccgtcaaggtactttcagctgatggtttatataaacgtgaaatatttaaatctcctgatccatttgctgttttaacagttgatggttctcaaactcaaacaactgaaactgctaaacgtactgcatctcctcattggaatcaatcatttgatttttctgtaactgaaaattcaattttaattatacaagtatttgatcaaagaaaatttaaaaagaaagatcaaggtttccttggtgtaattaatattagaattggtgattatattaatttcagtgatccaacaagtgaacaaacagtctctgaagaattgaaaaaatcaaattcaagtttaccagtatctggtaaaatgataatatcaatatctcataaaaataattcaagagattcaagagatccaactaatttttcaagacaatcttcaagtataacaaatagtactaataataataataatactactaatactgctactaacaataatatatcaaataccccacttaataataattcatcaaatcaattcccaggaattgcagcttcaagttcatcagttgcaactgcaactgcaactaattcttcatcttatgcaaatttgaattcaaataattctgcaacttctgcttcatctccttcatctgctagtgcaaggcaattttcatcatttgaagatcaattaggtagattacctcctggttgggaacgtagaactgataattttggtagaacttactatgttgatcataatacaaggacgacaacttggaaaagaccaactttagattcatcatcaaatgatcaaagaaataacaatattaataataatacacatactagtactaatataataggttcttcaaataatactttaaataatcataatttaacagaggaagaagcttcaaatttagaagcaacaggacaaactgtaccaggtttaggtgaattacctccaggttgggaacaaagatttacacctgaaggtagaccatattatgttgatcataatacaagaacaacaacttgggttgatccaagaagacaacaatttgttaaaagttttggtgcaaattcaggttataatgctcaaagattatctgcaatgggaccattaccaagtggttgggaaatgagacttgcaaatacttcaagagtttattttgttgatcataatactaaaactacaacttgggatgatcctcgattaccttcttcattagatcaaaatgttcctcaatataaacgtgattttagaagaaaattagtttattttagatcacaacctgctttaagaattttaccaggtcaatgtcatattaaagttagaagagattgtttattggaagattcatttagagaagttatgagacaaactcctgaagatttaaagaaaagattaatgattaaattcgaaggtgaagaaggtttagattatggtggagtttcaagagaatttttccaacaattatcacatgaagttttcaatcctgcttatggtttatttaaatatgcttcaagtgataattatacattacaaattaatccaaattcaaatattaatccagaacatttaaattatttcaaatttgttggtagagttgtcggtttagcagttttccatcgtagattccttgatgcattcttcgtcggtgcaatgtataaaatgatgttaagaaagaaaattgttttacaagatcttgaaagtgttgattctgaaatgtttaaatcactgtgttggatgcttgaaaatgatataactgatattttatatgaatcattctcagttgaagaagatagatttggtgaaaaggttgtaattgatttaaaaccaaatggtagaaatgttgaagttgataatgaaaataaacgtgaatttgttgaattaaagactgaatggatcatttcaaaaccagttgaaggtcaattccgttcatttatggaaggttttaatgaattaattccacaagaattagttcaagttttcgatgaacgtgaattagaattattaattggtggtttagctgaaattgatgttgaagattggaaaaaacatacagattatagaggttatcaagaaagtgatgaagtaattcaatggttctggaaagcaattactgaatgggagagtgaacaacgtgcaagattattacaatttacaactggtacttcaagaattccagttaatggatttaaagatttacaaggttctgatggtccaagacgttttacaattgaaaaagctggtgaatgtgatcaattaccaaaatctcatacttgttttaatagagttgatctgccaccttataaagattatgatacattgaagaaaaaattaacaattgctgttgaaaatacaattggttttggtcaagaataatttaaaaaaatacaacccttttttttatataataaagttttttatattatactttttattataatattatagtatccttttaatgaacgacaaaaaaaaaatgatcttcaagtccattggtagttgaaagaaaagagttatttatgtaaaattaaaaaaaataatagcaaatgcctgtcacccatgctgggagtcgaacccagaatcttttgattagaagtcaaacgcgttaaccattacgctacacgggcattgcttgttttttagaccttcaaagatttattaacacatattaattgatcacgtgctttttggatttttaaaaaataacattgaataaaataaaagttgtagtaaatggttcatttgtccataaaaagtataaagcttttttttgagtaactgggatgataaaaaaaattttgttttttgtaaaacttagttgatttattggaagaaaatacgttttttttaaaaaaagttcaaaaattagcatcttgtactgttaatagaccaaaataaagggtattagcaccaatgagatgtgatacgcatacaaataaagaatatcacttatatagttcaagaaaaagtgttaagtaataggtcaaaatagtatttgaaaattagagtaaaattatgatcagatctacagtactgaatttcgtttagttaaattaataaattgtttgtgttcttggagacactaaatcgtaggaatatagcgataaaatgtactatgatgcacaattaattattttgccccaacttaatttataatctgctatccaaggtaaatttatgcaaaacgctaaattcatttatgaatagatattagaatgtaaagttcaaagccagatcgtttaataaattgggaaaatattattattacacatcttgcactcaagatgatttgttaaatgaataaaggaagaaaaagaatgtagtgttgattggagaaaaaattaaaattaccagacttacatgaaaaaaagttatcgcactgaaatatttatccaaaagggcaatcaaattatcagggtttcttcaacatttcgatgaggataagacgactaagtgaaacaatacatggtcgaattgatagtgaaatagtacttgaaggattaaatgatgtcgtatatgagataattaaaaatggaattgaagcaaaaagtgataacattagggttgatattcgaataaattatgttacttctgtgatagaaattgaatataaggataatggaacgggtattgatcctgaatcaatggaattgtttggacagagacattgttcatcaaaggatgagaaatgtcgaggagttgctgttaattccattatgaatattagtggatcaatgattataattagtagagttaaagaatataatagtggatttaaaatgatttttaatggaattcaaagaattggggatgttgttaagaatggagatgattcacttggtactagtttacgaattttaggtctctatgatagggttccgataagaaagaaaattgtatttgagaaattagataaaagatgggccaatgaaggttctttgattaaacaaagggtagttgaatgtttaatcgataatccatgcattgacgtggttgtaaataaatatgaatttagaggtaataaatggaagttgagtggtgtttgtagcaattctattaaaacaaaggagaaactaccatttcaccatcaaatgatgatgattaggaatgttttagataatgaattgttcaaaaactacgaaatttataaaataaagggtaaaggaatagaattgaaggttggaattggattagagactgttcaaaataaaaattatcaatttttgttttataatggggagaaagtaaacaatgaatatttgttaaaatttattagtaatgagttccaaaataattatgataaatggggagatgaattcaagagaggagaaaagagaatcagtatgtatggacatgcttattcagttaatgcaatttatttagctagttttaaaggttcagaggaaaatattaatatagaatctgcgaaagggttattaagtaaagctattagagtttattttggagttatgaaagggaaaaagaggaaagaagaaaagttggtaaatggcaagatactcgatgataaagagagaaaaagagaagagaaagttctcaaaagtagaatgctagtttcacaaatagatctaatggaaatagaaggtagaatggggacaataaaaaatgaaggatcgttagagaatagggtaattgatatggatcaattacgaatgaaatgccatgattgtaatgaccatcaatcacaatcacattcacatgctgatgttcccttatcgcaagaggaaactacttcgcaatatttcggaggagtgaaaatcatattgaatagagaagatataatgtatatggaagtgattggtcaatgtgataaaaagttcattatagtaaaacagaggaaaagtggtgatctttatgcaatggatcaacatgcatgtgatgaacggatacgagtggaagaaatgtacaaatcattagaggaaggtaaatcccctattgtagaaatagtgccaccatatgagatacagtttaaacaggacgacctcttaaaagtggaaaggtcaatagaaaaaggtaacctatcaaaatggggtgttgaaatttcaatagttgataataataataataatgataatgataataataatagtagggggcttattacagttaataaattaccatgggttacgcaccgccaccttgatgggaaaaatgatgcgacacgtattttacaacgtgggatttcagaggcggtgcaggagattaatattggtaaaatgcccccatttataagggaatgtgcaaaatcatgggcatgtaggggtgcaattatgtttggagatgttataacaattgaagagcaacacaggatagtgaataaactagcggaatgtagactcccgtacgaatgtgctcatgggaggccatcgttgtatccattaggaaggatataaacaatagtaaatgaaaatctaaaatattgattacagtggcgaggttaacatagaataaataaaaaataaataggtggagatgaaaaaaattgtatggagttgcatcatgtgctgcaaaattatctctattattctgagcttaccccatatctttatgtagatgttcatatctttcttttagttttagataccttcaaaacttcctttttaagcaattgaacacatatatgacaagagacgtacagaatcattatctatttgaagtggccacagaggtggcaaatcgtgtggggggaatttattcagttttaaaatcgaaggctccggtcacagtggcagaatataaggataaatatattttacttggtccattgaattataattctgcatctgttgaagttgaagaattaccagttactaataaagcattaaagaaaacattagattcaatggaatcaagaggtattaaatatctttatggtagatggcttattgaaggtgctccaagagttatattatttgatattggctcagcagctcataatttaaatgaatggaaaactgatctttggaaaattgctgcaattccaactcctgaaaatgatactgaaactaatgatgctattttattaggttatttaactgcttggtttattggagaatttagttgtcatcaaactgaaaaggctattattttacatgctcatgaatggttagccggtgttgctcttactttatgtagacaacgtaaaattgattgttcaacaattttcactactcatgcaactcttttaggtagatatttatgtgctggctcagttgatttttataataatcttgataaatttgatgttgattatgaagctggtaaaagaggtatttatcatagatattgtattgaaagatcagcatgtcatgcagctgatgttttcactactgtttctcatattacagcttatgaaagtgaacatttattgaaaagaaaaccagatggagttttaccaaatggtttaaatgttgttaaatttcaagcagttcatgaatttcaaaatttacatgctgaaaagaaggaaaagattaatgaatttattagaggtcatttttatggtaaattggattttgatttaaataatacattatacttcttcattgcaggtagatatgaatttagaaataaaggtgttgattttttcattgaatcattagcaagattgaatcataaattaaaggaagctggctctaatttaacagttgttgcattcattattatgccagcaaaaaataattcctatacagttgaaactttgaaaggtcaagcagtcattagacaattagaaaatactgtcaaagatattcaagattcaatgaatcaaagattattgaattggtgtcaagatcctcatcattttaatgattcaaataagactgctttacctaatttagatgatattttaaaatcaagtgatagagttttattgaagagaagaatgattgcaatgaaaagagaatcatcacctgcaattgtaacccataatatggttgatgatgcaaatgatccaattttaaatcaaattagaagttgtagattatttaatgcaaaggaagatagagttaagattattttccatccagaatttctcaattcatcaaatcctgttttaccaattgattatgatgaatttgttagaggttgtcatttaggcgttttcccaagttattatgaaccatggggttatacacctgcagaatgtacagtcatgggtattccatcaattacaactaatttatcaggttttggttgttatatggaagatttgattgaaaatagtaaagattatggtatttatattattgatagaagaatgaaatcagttgatgaatcaatcaatcaattagctgatcaaatgtttgaatttgcacaaaagacaagaagacaaagaattaatcaaagaaatcgtgttgaaagattaagtgatttattagattggaaaagactgggattagaatatgttaaagctagaatattatcattaaagagagcataccctgatggttttaataataattcatcatcaaatccttttgatattgatgaaaaaattaaaattacaagacctttaagtgtaccaggttcaccaagagattcaaaattaggttcaatgacaccaggtgatttaggtactttacaagaaaataatgatactgaatatcttaattggtcactgaaagatgatgatgaggatgtcacattaagaggtgcaagtgtcgtaccaagtgacttagaagatgacgagtagttgtttataataatattagatgcataatacaatcgttaagttaaccactgcataacataaaattatataaaagtttaaccgaagttgtataattaaattaagcgcttatcaaacttagctttttatcgtcagatcgttgctttattgaaaaatggagaaatgatttcttatcagcaacttcatactcttttcttttttttgtctttcattgaataatgtctaattacgttgttattggagcaggtgttattggtataaccaatgcacatgagattttaaaggcaaatcctaataataaggtaacaattgttgctcaacatttcccaacagattttgaatttaaaaatatctatacctctccaatcgcaggtgctaattgggaatcttttgcaaaattagatgatacattcgttcaagaaattgatacaattggttatcgtaaattttatgatttaattagaagcagaccagaagctggtgttactaaacgtttaaatagtgttttagtaactcatgaaaagtttagattagatggtggtgtaaagaaattaccttggtttgccagtggtgagttcagtaaagagatcaaatttagagaatataatgatggtgaatttgacaaggagaaatttgtttatggttttgaatttgatggtatggttatcagaacaacatattatttatctttcttaattaatgaatgttggagaatgtcaggtgccgctgaaggtgaaaatgcaagattctctatcaagagaggtactgtttcaaaagttagagatgcattccaattatcaagttggaatagaaaagtcgattatgttatcaattgcactggtttactttcaagaaatttactggatattgatatcaaagaaagagagaaaatgtatccagttcgtggttgtgtttatgttgttaaaaacaatgttggaattaagaaagtgactgttgttgaaatagcagaaaaagatgaagggttatacattatgcctagaagagaaggtgaattaattattggtggttgtttccaagttggtaatgaagttaaaattgttgatgatgcattaagtgatagaatattaagtagatgtaaacaatatttaccacaatacaattgggataatttagaaattgttcgtaaacaagttggctttagaccttttagagaaggtggttatcgtattgaaagagaaggtcgtattgttcattgttatggaatgggtggtgctggttaccaatcaagttggggttgtgctcaacgagttcaagatttgattttatgcaagagtaaattataatcatcgaaatcattattaatatttatatctagtctaattatatcttatatacattatttcattatttaaacatagagttgtaatcattttttgataaacttatctttgaaattgactgtttacgaactgaaattaatccaagttctctcatatgaggtgtttgttccgtagtatttgttaataaaaggttaccttggtcatctagagctagtaatattccaacgagtcgtcgaccatcagtggtatctacgatatattgtctagatattaggtcttctggctgcattgtagaaagaaggttggaagaggaattttttttcaagtttttgtcacgattcaataaaatttattattatatgttggattacctgttgtttcgacattgcttctctcattctaccaacacaacacaacacaacacatcaaacaaatacaatgtctgtaacagaacatgatcatgatcactcatctatattgagagtttccggagactccttggaaagcatcactttacgttcagatttagcagcccgctcttcattcctagtagggacgctattagaaggagttggtgttatagaaccatcaccaagcggaagtacaactattgaactaagtgatgttatacaaacaggaatttcagatacagagtatttagagcaatggaaggagagattagagaaggaagttgatgaatgtgagaaacaacaattagtgcaggaagaaactgttgataaaaccactgagttattacaacagatggactcacaacctttaagaaatatagaggatgttcaaaaagagttgaaaagattggaatccttaatgtaataggttgttgtataatagttaaatatacggttagggtgcatgtataatatattgtgattatatttttagtacaaaatttgtgtatggatataatttattcatagtttaaaccttttagatatactagtatcatttatgtatatactatatacaatataataagttatgttagaaggaaaaggaaaaggaaagaaacataacagaaaccggaaaaaacggtcataaaattggtaaaatgaccataaaacatgccaataaagtgacttatcgctctttaatataaagataagagccattatctgtttccacctttcctttctcttcatttaactaacatctttattaaacaacaataccacaatgacgtacgtatatatacaacgacactctaactcacgaatgatatactaactgaaatgtaatatagctcacagcgaagaatagaactggacgtaaggaacttactaatgagcgattttagagcctccttagttaatgataacattagagaattagcagtttgccttgaaggaccaaaagattcattatatgaaggtggtgtatggaaaattcatgttgaaatacctgatcaatatccatataaatctccatcaatcggatttgaaactaaaatattccatcctaatattgatgaacaatcgggctctgtctgtttagatgtcattaatcaaacatggtctccaatgtttacaatgattcacatatttgaaactttcatacctcaattgctaaactatcctaatgcttcagaccctcttaatggtgatgcaagctctttataccttaataatagaaagctttatgaggaaaaagttaaatcttatgttcaaaaatatgcaaatagaccagaagtactacataaatttaatgtagaaatgggattagatgatgtagaaggtggtgaactacgagcagggtcacggaatacttactccgaaatggatccggatgatgatatgagcagtattgaaaacaatattaatgaaaaggaaaatatccctgaacaacgtataaataacaaggcgttttctccattaaaggaggttacctctcatacgatcaatatagcagcagactcagactccgatatagacatggatttataatcctatccttcttactgataataatagtaatagtagtagtttaaataccccatactaagagatttactgcgccaccaataatgcgcctcagttatttttatatttttaatttttataggtattttacacattgggatcaactattttcaaattgtaggctttgaagttgtatatataaaccctttgatgtatagttttaaatcgtattaataataatataccgatactaccaatagctaatggaacgtcaaaagaaactgaatagaagagtatctttacaggctccattgaggaaaaataaactaaagttatctgatgatgtgatagagagtatagttactttccaaactcaattgtttcaaaataggatacagagtttaaataatgcttattctaatgatcctaagtttgaaagggatttaaagataataaatgattgggtttatatatcgtcaaatttatgttacttgatatcatcatacgattttgaacttattgaagaagttgtactacaatcatttacaatgttctatttgattatgaaatttaagctattaaaaataaatagttcattatgtacaaaggaagattttcaaaatataaacatcttatctcaaaagcttgtttcttttactactttatcaacttacagcgtgtacttttcacatatcaaacagatagtagataacaccgacaaactgtcaacaattgaagaaacattaaataatcataccaataaccttaccaataaccgcaaatctcttgatccaagagctaaacataactcattatcatctagtgacttgtacccaaatgaggataatgatgatgacgatgatgatgatgatgaacagtctgaagaagacctcgataatacatttcaagagtatataccgtcatctaaacctgttcagttaagtgacacagactccacttcatctgaagaatctaccaccataccaactgtggaagtaaaagatttagcatctttccaaaatgaactactcattataaatataaacgaccaaaagctacgttctagctctaagacaatcattacagtaccaccccaatatattgataatagagagtttttaaaattaaatgttttaccatatttacaaaagcagaataaaattgttatattttctaaaagtaattacatcactcatttagaaactgatttattcactctccttatctcattacacttcaataatgtttattggttgaagggaggttacactagttttgaaaaatattatattacccacagagcacccgctaaaacaccatttaaagcaaattcacctcctcctccaattccaatggcggaacctttgataccaataagcacctatacgaacaatcaatcatcaacaccaaacccttcatcatcatcaactcaaacttcattacaacaaagtttacaacatcaattgaaaaatcaaatgaatcaatcaacattacctcgtcctttatctattccacctctagtcaaatcagtacaaactaataccacatcattatatcaactgtccagacttgactacaagccattagtgacattgcgtaacatgggatctacatgttatataaattctatgattcaatgtttgttttcaattaaaaagtttagagagttcttcatcaatgatagtttccttaaaaaatatttatttgatttgaataataaacaaaacattaaattaacttcaggagttcatgaattatttactaatttttataatatgtctccacataatgcttcacctccggtaattgatatgacaagatttttatcagttgttgcgagattaaatcctcattataatataccaaacgaacaacaagatacatcacagtttttatactatataatcgatcaactacacaaggaattgaaattcaattttaataaagcagtcagtctaaatctgattaatattccccataactcaaatgaaaagtataactcatggttacagaagagttacgaaaatgaaggattcagttttattcaaaatttatttaatatccaagaagaggtaaagatgagatgtcaaagatgtggctacgagagtgtaagatatgaaacttccatcatgatatatttatctattaagaacaagaaaacttcattagaggaaattatcaagagaaactttgtcccagaggagatgagtttagcactaggaaatgcatgggactgtgatggatgtaataaagctgaaaaagaacttgaagttttacaaagtaaactagagaaagatcatgatatatacatggcgcaacataaaatcaaagagctcaccgaaaaggaacgggaaaaggataaacctaaatccaaattcaaattcttcaagttaccaattcctagtagtaaacatgagggaacaccacaacctgatcacgattttgaaccatacccatacactattccattaaacgattttgagaagagagaatacaatagattagctgatatttttactagagagcgaaaggcatatcgtacagttgaattaatagaattaccagatgttttagtattctgtttatcattatttaatccatcacaacaaggtggaaaaattaatcttaaggatttgaaatttccagagatcttgaatatggatttaaagggacgtgaaaaagtttataaattaaattcatggatcgatcattggggaaattctattgattctggtcactacacagcaacggccacttataatgataatcaatggataacttttgatgatgatcattttaatggaccacatacaaagtttggtaattatgttcaagataataatgtttatttattattctacgaagcagttgtatagtcaactaattttatatttatatttcctaatacagtaataaacaaaagtgcgtgatggaaaaaatacatgtgcatttagaaatttaatgttttcatgataaaatttttttcaagttctttctatatatatatatatatatcacttttcatcaagttttcattaaaataaacttctcttttaacccaatgagcgtaataagtattaaaaatccattaaaatcaactgtgattgaagaaaatcatatcaatgaatctgatgacgaaaataacgatttaatgttagatgatgcgattgatgaagttttagatagtgcacagaagagatatatgaacttggagaattcaagtatagttaccccaggtgaattaataactgaagatgcaacatggatgagaggtcatgggacatattatcttgatgataaaacatattcatctgttgcaggtactatatcaaaagttaataaattattaagtgttataccgtttaatggacgttatagacctgaaactggtgatcacgttgttggtagaatcattggaattggtaataaacgttggagagttgatttaggatcagaacatgccggtattttagtgttgggtgctgttaatttaccaggaggggtattgagaagaaaaagtgacagtgacgaattacaaatgagaagtattttaaaagaaggcgatttattaaattgtgaagtgcagagtacatttaatgatggatctgcaagtttacataccagatcattgaaatatgggaaattgagaaatggtatgtttgtgaaggttaattcatcattaattgttagaactaagaatcatttacatgaattaccaggaggtgtaagtgttatcattggtgttaatggatactgttggatttttaagacaaagaaccaagcatcaagtgtagcatctaataaagcagaaagtgagtttacttcagcatctaatggatattctgtcggaatgggaagtgtgagtataactagattagaggaagaaagttcatgggaaatttatagtgataagaatgataagattagttcaagtatcaaagaaacaatttcacgttacagatgttgtttacttgcgttaagttataataatatttctattaatgctcaaagattagtgaaagcttacgaaatcagtttgggttatggtgaaatcaataagttaattaacgaagatgttaagaagagtataggagaagacttgataaacagcgagaagatgagaggttagataattaaacaaattttataaactattttttgtagaatataagtagggtaagaagtatcattgattatagatttttttgagattgtctatttcatcagaaggaataacttcactaaacaaagagcccttagtattattgattaatcttttctcaaaatcagttcttgattttgtttgcatttgatcatgattgtaaagagaccatataaggtcctcttcaccgataacagtgtggtgatttccattatatacaatatcagcaacgtcatgtaggatatttgcagttaacccccaacaatttctagtacgaacatcaaattcatgatcatcatgagtttcatcttcagatgcggatgataaatcttcaatttcttgtaaccaatttacttcatttttattgaacaaaggaaaaatatatgatcttaagttccatggtaaaccagcccattttgtcttaatatgactttgtttcatacattctttcagagtgaagttatttgatttaggttgtaagaaatcttttagaggaacgctgaatatacttgcagattcaccaggatttagtactaaactatgcaagcgacgttcagttttttcaacactttcatgccaattaatataaccaacacaaggtgcaacagcaaggaaagttctagctaagtaagcaggtaatacttttaattcgtccaacacaaaaccaaattctttgtgtaaaagagtattatgacgagatataccaatttcttcatccatttctcttctagcacattgaaattcactttctaatccattatcagctttaccaccaggaagagaaatatgacctgaaaaactttttaattgtcttgatctttttgttaatacaactcttaattcaccttcattacctaggaaaagtaataccattacggcagatcgacgtgcaacaggtactttgtgccaaacactaaattttgattgatttgcaaaatattttggtttaaaattaacaagatttgttaaatattttgattccatgttgtgccttataatcctatgttgatatgatgatttagggattggtggatcagggactgtattacataaagtatccttctcaacattagtgaacattggagcgacgcgtgccacagtttgtgacataaaggacgcgttttggtaaaaagtcttattttgaagttgtctccaaatttcagctttacatggaaaagtgttcaacatttgcgtcgtcgtctgtcaacacaatagtttaccttcacttagtggaaacagtatttttaacattaagtaacgtgaatggtccctagtttggataagtgagaatgtctcttcttttaaaggggattctcccctctttttgttgatggtaggaaataagaaattaggacaacagaacgtggagaagtgagggaaaagtaaaattcgtatctcgcaaaattgaaggtgttatctttgcaaatattgcgaaaatgtacatctatttcagtaatcgtttctttttgtattatacatgtgtaaagagaaaagatataaacattactttaatagtaaataaacgttaaatagtatattaatatgaaagtgatcaacactcttcaatcttttttttgtcttcattttgttcaacttgtgtacgtagaagtgctaattctttagtcatttcacttaaaacttctagtaattgaattgtatctttaccctgagcatcttgtcccaagatttgtctggttcctaaaacagtaacacaattttcaattctggtaattgtatgatctaagagcagtaacataaaaggttctgcagaagcaaatgtgtttcccatttttgcttcagcgtccctttgtacaccatcagaaaatatcttatattgtcccttccttgaattattaacagtttgtttgcacaaaaatgaatttattttctccaatctcaatgctatcttacgcaacaaccaaacagtttcactggtaataccaccaacaattaacttactttgaatagtattattgattttaccatcttccttagttatcatctttaatctagaacttaatgattttgggaatgtaacccacaaattttcaggtgtttctaaacctttcaatttctttgcaccaatattttccaaaacaatcccaatattatctaattgattcatttgattttcaatatctttacccctacttttatatgtatatgccttattgacatcaattttgttattcttaatcagttgatgaatcttctttactttattcaattcattataaaaatccgtacttagtgtaatttgaccaccatctgcaactgaactaactcttgacgcacgattaaccataggtccaaaataatccattctcttagtaataacatccatttcacagacaggagtcccccaatgaatacccattctaacagataatcctctaaaaattaaatttccttcattatccttaacttcaaaaccttgatcacttgaaataatttcagctggccattcatcagttgtcaataattgagtttgaacaatataacaccataataatgcagccgtcggtgtcgggaaactgacaataaatgcatcaccttctgtcttaacttcataaccaccaataattcttaattgacgacgcataatagaattatgaactttaattgcagatctcatagcagctggataattatcccataataaggttgaattcttgatatcagtgaaaaccattgctaaatctccaattggaggctcaatttcatcatctaacttacgtaatgtagaatcttcaggttttgatgcattataatgtttttgtttagaagtaaattgtctcaatgataaaacaactgatgtaaccttagaatctttactaccataagaaatagcaaaatctcttaatttttcagcagcaccaattgggtttgatttttcttgtctaataatatcagcagctaattcaaaagaaatccttttccaaacttcatttgtacaaattgcaatcatttcctcatttctagttagtttaaatttatgaatacttggttttgcattaatatgtggcattaatttgaaaaatccaacagcacgagaaacgtttgaaacaccatctaaattaccatcagttgtaacataaccaccggaatcacgaattctatcatattcttttgttgcataaggttcatgtttagttgtaataacattgaattcaccatcagatttggttaaaatacccattatatcaccaacattagcaacataaacataatcttttctaatataaataattgttgcagaacaccctgataatccatcttcttctaatatcaatttatctgtagtttttgttctatgtgcagctgctgaactaaatgtagaagtttcatctttattgattaaaatactcatttcactgttcatagttaaaaatgcacctcttaaacaatcttcaacagtttttggatcattactattgataacagtttcacctaatgtttttagttcttcaattaaatgaatttcaaaagtttcttgaataatcttggaaattttatcaccaccattaggagtagaattaataccatcataaattgtaattaaaaattcatccggattaccacggaatttttcaataacaacatctcttgtggttaaggaatctgatgagcctaaactatctgaaataccataaccaaatttacctaattgtgaaactgtagatctaactctcataccaacactttgatcaggaacggaatctgtagtaatagtaacatccattaaacctaacatctttagtttcttaagtgttaaaaatgaatcaagtttctcaccagtttcttcatcaacactatgttgtggtttaatctccaatcttttattacctgagaagtttaaatatttcaagtttttattataacaccaattccaatcgtatgggatattaccaatattatatttcaattgattactaccaatatctaatgcatccaaagctttcaattttgataattctgcaggtaaagtaccaaatctattaccatttaaatgtaaaattttaatattttccaaatcatccaaatcttcaataggtaacgatgacaagaaattacccgataagtataaatttttcagctgcttgagagatgataaataaccagatggaatatcaaagaaatcattatatgataaattcaaacatgccagatttttaaataaggctaatgttggaaaaactgattctgaaagtttattgtcgcataaacataactctttaagtgaaaatgctaaacacaaattatctttgtcattcatattgaaagaaagtgtttcactaactcgtctatgtttcaatttattattttgaagattaataatttcatcttccccgagttcatcttctgatgcaatagcagtatctcccatatctgaatcatgtgttataatttcaatactgtcatcactattactactgtttgtattaacctctttaattttttccagttgcatggatgtactataactattgaataaattatctggaggctcagggaatacttccagtaaattagaggctaaatttaatacttctaaactaggcaagaaccaaattttttcattcactctaccaatattatttaaatgtaaatctaacacctttaatttttgtaatttgcaaatagaatccggtaaactcgtaatattgtttttgaaaaccgagaaatgttgaacactcttcatcttactgattgaatcaggtaagacagtcaaatggttataatccaaagaaatcttttcaactgcaattaatttagatgtgaaagaacatgatgttaatttacccttggaaaaatcaaccaatttaagatttttcatatcacattcaaaatgaacatatgtcaatgggttgatattcaactcaacttcaaataaagttggtgctcttgatctaaaaacagatattttattaccagttgctcttataacttccaattttggtgaatttttaagcgaatcaattgaagtgatagcattgaaacgtaaatcaactttaattaaattttgtaaattttcaaaaaattcaggtaaatctccatgaattttattacctgcaatttgtaaagtctcaagatatttcagattagccatctcgggtggaaaggtacttattgaattatatgataaatctaaatttctcaaattatttaatttaaaaatttgtggaggaatagttttcaatctattggatcctaaattaagagtttgaagattatgtagcattgtaaatgtatctggtaaatgactaattctgttacaggcaatatttaatgataccaaagttgacaaaattgaaatttcaagtggtatggatttaatatagttaacttcaagatctaaatttgccaatctaggagcataaataactgcatatgggaaagtagggctaccacttcttgtaaatgaaagtgaggttaaatttctagaatcatgcataaagtcagacgtgaattcaaatgatggattttgtgaaacatttaatgttattataggttcagcgtataaaaagtttggaatatcttgtaaattccagttatcaagattaacattttgagggttaatcattcttttcttttcttcactgattacttcaactcctttttcttcaactataaatttaaataagaaacttaaatccgttctttcaataaaatccagattatctctttcagtataaccatacaggaataacatttttctttgaatttttaatggtttctcttctaatgctaatgttcttgttaaaccaccacatttcaaaaccattatatgatcttcctcagcttttaaaaatctttttcttcttaacatatccagtatgtttttacaagtactttcaagagtacaagataaaatagaagatttagtccctttaaagattctaacagatgatttagatgagccttgtaatgcattggaacctctctttgtcatttgtgaactagttaccaccggtgcttgtaatcttttattattattcatgcttggttttatagtctcagcagatttactagagctatctagttcattagtagattttgattttgaatttgcagatggtttattcaaatcagaagaattacttccttcattattatcaaaaccatttaaatctactgatgaatcacttttcaatgtacgaggagttatttcagataaagattttggtattttagaatttgagtttgaattagagacaggtgaaccttcattagagacagaacttgaaatatctgaatctaaatttgacatttgagtttcatttttttcctgctgttcaagctcatcaattttaactttccaactttcaggaggtctccaaaaagttttttcatcatttgaagtcattggaatacttgtaactgagccaacacgagacattgcatgtgcatttgtaattgcagaaagatcattggatgtatcttcatcaattaaagatataccatatgagcgagcaaaactgtttgtagcactcattggggttgacattaaaagtggacttgaaggttttctgcttgaggaactaccatttgatccactaaagctttctgtgtgatgattatcattattatgatgtaaatgcccatcaaaatgaccatgtgggaaatgtatactaccaactgattttttcttttcacttgaatgtacagaatttctatattgcgataaaggttgaattgaaacacctttttcagatggttttctagctttaacagatgaagttgaagtagctcgatttttcccatgatccatagtaaatatttgtgcagcctgtgcaggtaaggaactcgattttttatctttctccatgggtgggttattatttatattaaattcaagacttttatgcgtttcactttctcttcttgatggtaagaatctatttaacaaatttgctcttttacttgtctttttacctgattttgatgatctatccaaagataaaaaatttgaataagatttagatgttttcactgaagtttcagaaggatttctacccttttcagaaccagaactagtatttgtggtcagtggaattcctctatcaggtaaattgctatttgtactactattatcagtatttatattattactactattattatcactcgaataagataatttaccaattgcattcgtaaaacgagaaggatttcttgaagagcttggagatgttgaagaatttgaaccgtcagaattttgtcttccttgtttagttttgtccgatgaactggacgaatctgcataaattgtctcattcccctgttcttccatatatttggagttgaattggggtttcatattgtcagaataatgcgaagggttcgacattgtcttgattccctctaatgtaagcttcaattcactttactaagccaataatattattcccagtgaaatattctaactctacctctaactctaacaattaaattcatgcatctcaatgtatgcacaatagaaaaagtgctagtaaaaaagacataaattaagggaaagtttggtgtacgggagagggatttttattttttttttctagacaccccccgaaagagggaattattttaatattagtattagtatcaaattaattatccactgggagtttataccacttgatgatctttaagacttaagggcaaagatcttctgtatatatcaatcaactcatataatcttatataatactgcactcagcctagtgctttattggagaaatcatttatctataacttacttatccagggaactccgcagtgatgctgagtagtcttattggatctcggaagtctactcaggggcaaacccgtccgcaagtgggacctcaaagacaaagtgaaactttcaaattctataatacaaataattcattatctgatgattatcaaataaaatcaaatgataaacaacattcaggtattaatggaataaatgatatgagtggagtggaacaggcaaatataaatttatcccccctatatggtaacgataatgttccaccttctactaattttaaaatatcagataaaatatcatcttttagattggtagttgtacaggatgctggaattagaaggaaacaaccattgtttgattctgcactaccatgtaacaataatatttcaaaaatgaatcaaaaattaaacaagaatatctatcattcaattaatgaattatcattatttatgtttggatgttacggtataccaatatcagagaataacactacaactaaaattcattatttaccctctctttcaaatttacattcttcaattttaataactagattgttttcacttgattcaactttcaaattgaaacctcatgcaattgtaactgaaacaaatgaatgggaaactcatcccatactagacgcagatgaacttccatttttacaaaatgcttcaagattttcaataggtatgataatcccagttcattcatcaatagaatcagttactgaggaaataactaataattgggttagtatttcagaatctttgaaagaaatacaagatctaatatcatccaaactggaatatcaatacaaaactaatcaaaataaattaagacaattacaaaagcaaaataatcaaattgcaaatagtaatgcccaatctttacactcaaataaattaagtttttcaatatattctttacaaactgaaattgaaattttccaaaatttagcttcattcctaagatctctgatatctttagtagaaacaccaagacttttcattgacttgaaacattctaatcaatctttaataaactgggcatcaaacttatcactttggaaagaattaaaggatggacgaaataatgatcatttccaggaaaatataaatactgataatgcttcagaaacatttttacacccatcatttacaaatcatccttcatctgtaccacaagttaaatttctagcttcattattggcattacttattccataccagagttgtttatttaatgattcggggtcatttttgaacgaaaatttgttttccaatataagaattataataggaacaggaaatccagtagtctctgagaagcttatttttattatttccgggattattggatatgatacattttctaagatttacgataactatgaaactattttgaatcataaagtcaatgaaaaagttaaaactagtactaatgatagtgctagctcttccgttgattctaatttacccaatttatactccaatttaaaccttaactcatctcagcatccacaaagatcattaacaccattatcatactatccatcatctgccatagccactaccaatgttttacaaaattcacgttcattttcacaaacttcatcagcatcgtcatcttcttcacccagaactcctttgccatttcaacgccaagaaacaaattatagcatgccaattccaatatctcaagaaatgaaagaaaaatctccaagtgttcaaactaggtcaggctctctgtatataaattctttaggttcaagcgttgaaaaaaatggtatcaaatcaacacctttgtgtatttcacaatcaccaagcatagcaactgtgtcagccagtatcaatacccaaagaataaataccccactaagccgaacttcatcatatgcatcattacaatgtttatcaaccagttatggcgcaaatgttccaaatagtattggctcaaatacaccttcaagttcatggaggaataattttggttccttcatggatagatggaaaaattcgatcacaccatcaccaactacttcacatttttcacaattatctcaacctgtaacacaattcacaagacaagattcaatatcacctagtgtaagcgaatataatgaatatccttggtttggtaagcgagtgccaaattctccaacaatgtcctcctcttcatcatttatctcaagtaataacaataataccaccaatagattcacaatcaagaataacccccatttaagctcgtatattgctgaaagtaaaaaacttgatattaaaagaacatcaacaaaattaattataccttatgcatcaaaactatcagaaagtatcaaaaatgaaataaataatataatggatggtaactttgaatataaattagatgataatgttatgaaatctgttgttgaagtgtcattagatgatacaataatgaattctgatatttcatgtgtaaatgaatttgagttaccacttttgacaggttatgttccacagtttcgttcggaatttcatttacaatcttgcaatagtaaacaattattagaatcaacactcgttgaaactatgagacacgatttaaataatttgaaatgtgagcatagtgaaatattttttattaatttaggaatgcataggatcacccattttgaaatggatgttaagggaaaagtcactaacgatgtaaaatcagatgaacacagtaattactcgcaattagaatataatagaagcgagacagaaaagccaatcaaatcaaatttgactaaatatatggaatgtgctaagaatcttcatcaaactacattattgacttcctcaaagtcattgaataatgatttaactcaagaaaaatttaatagagaacatgatattgaggaaagagtcgaaaaagttgatcaaatcttagaaaagattgtatggacaatcacaaactttttttatgagattaataaaaatgaatgcagtagcgatgatgatgatgatgatgacgatgaagatgaaacattgaataaaaacagcgatggagaagtagatgaggatagattaaagagtaaagctgatttagagaatgaatgctgcaatgaaatcagatctttgatctccaaaatgttggaaattaaatgaccaaaaaaaatttaatacaaacctgatataaaaaataatattctaataatttataaatcacaagtatacaactaataattgaggtatgataaaaatttgattcctatcattgatagaaatcatcataagtatcaaaatcactatcttcactatcatcaagattggattgattactataatcagattcttgagtactataaccattttcttgttcaaatttacgtattgcttcttcataagcctgtggcttatatttatgtaaaactttcctgtactcaagatacaatgattcattcagtttgaaaggtttaatatcactgaataaatgttgtccttttaaatgaggaattccacaatgtctacagaaaggtgatgtttcatgatattggtgaaattgaggtggtgaatggatattcataaccctgttattggaattcagcttttttgatgatttgaaaatagacctatttttgtcatttttttcaaaagatttcggatttgaagaattggatttcttggactttctttgttttggaactttttcaactatttgattttcattattgtaaatcttttcagttttacctatttgagaggatttattgttaatttcgtcaatattagataaggtaaactgtctcagtgattcatttaatgatgaatctaacttactcgagttttcgtttttatcatttatgaaagaagaatgcatgtctttcgacaaatcttcagagctcagatttttttgtataatactatgtgttacattgaaactcatatttttcttatcgacattagcaagatccatcatgatgtattcactattacttctaatatattctgcaacatctaaaggtcgtatttgaagaccagatttggccatatttcccagtatctcatcgatattgtattgtatctttgaataattagtagaaagtaaagcaattaataaacgtgtattgatattttcgtgtaataatatcgtttgttcaggagttctgttactttcgttatagtattcagttatttcatccaagttctcttgatatttgattagtgagcctgaaaatgtattctcaattgttatgttcttaaataaatcttttgcaaatgtattttcaattgatccagcttgtgtgttttccatagaacgaagaatcttcagatattcacacaatgaagatgattttgaaccactattatccttcgtgcacgttttaaagagaagattaaaattcaaaaactctttatgcttaacaaaatgcaataatatttcagaagcagtttcataataagttattaataagttttttggcaatttgaacttattagcccatttaccaatatttgttctatctggcttctcttcggtgaaaagtcgtgtacaatcacttggaaataagtcataatttttctctatcactttcatcaatttccaaacataaatagatggatgaattttattacaattgattctatctatccttaatttttgaaattcttcagatgtaaatatattcctcaattgttctctaagcttaaaatccactgtcatagcaaaagttgccttctccagactacttgattcttcattactgacatacagttcttttctactcatttgattgaatttttattaattatttaaaagcaatgagtagcagtatataaatacgggaggagactcttatccaactataatccaaataagttaacaccatcacagagaatgaatcatcaaggaacatcgaagaaccgttttgttatgatttcattcagaaattcaatcttcgctattgttcagacaaatttcatcgatgatctattaatgattctatatctgattctatttcattatgttattatacaacttataaacttataaattagctctttcagggggtgaaatctcatgaatattaacagtcttactatccaaaccttcaatattagcaacacctaatggtgtgataaatatagtttgtctcttaggattttctgcaaccttatttaaaattagtttcaacgcaattcttctattaacattatccatgaaaacatcaaactcatctaaacctctaattctagaatgcattggaccccaaatcgcaaataagaacgcaatttgtccatatgatttttcaccacctgaaaatgattcaactgatcttaatggacctgtatcttttgtagcaacttttaatgttaaggtacctttcttgatattgaattcaattctacctctaaaacgacgaattttcaatgcagatatgaagacggattcaacttcttggaatgtaaggtatgtggtttgtaatagattattcaatctttcctccaatgccttatataaattattgtaaagatttatggattctgtgaatttattttcaacggccttcagttccttgtttgcatttaataagtttatttctgctctttccttcgttataccttgtctttcttcaatttgttttaagtatctattaaccatatctatttctctatcaatagattcatttgttgtgtttttagttaaatttgcttcttctaatgtacaaaattccaatgcttgtgattttaaagtttcaatattttcagtgatttgctcaatataattttctaattttttgagatcactttctagtttaacattattattttcaagatttctaatattgtttttatgaaattcgatgttggagttgaacccattataatcgtcaaccattttagagtataattttttagcactttgatagtctgcagatatagtttcaaaaactgatctctgttcatttaaagttgtaatagattttgcttgttcagtttgtagtggttctaattctaaggcttgtaatgaaatttcagattcaagctcacttttttgattcatcaatgtatccagtttagaagtaccaactgccattttttcaagtttatcatttgttttatctatagattgcgtaaattccttagctttgaatttcaagtcgtccaatactcgttgtaattctctacacttatttcttgcattttgttttttatcgtttatttctctttccgtttgttctcgtgccttttttaattcattcaaatctctctcgtatctcattactaccgaatcaccttccatttttaaccttgcattactaaatttggtatttacggtaataggatcagattgataaacaccattcttcttgtatattctaagaacattactatccacaaaacaaatcgcagatgagattaaattatgagtatcttcatccaacacacgttgagcttccgctctggttggaactaacactgtattatgaattttcattgaatcaaccaaaaagcattgtaaatttttatcagcaatatctaggacatctaggatggttggatacttagttcgtgggatatagttagtgaaatcaaaaacttcaggttgtctaacagtaatttcactccctgtattatgaaatttaaccttttgactaattttttgtgcatcttgatgattagttactaaaaatgagcacaattgtttttgcaacagtgtttctaaaacactactccaaggttgaccagcttttttcaattgaatatgaagtccaagtggtccaagaacagctccttgaaatatttgtgattgaagatcttttgataaacttgttaaaggtttactaagtaaattttctggtttgttagaatcttcattatattttgcctctcttattttattttccaaatctcttatattgttaataatttcatatagagagtttttattttgcttttcaatttcattcaattcaattttagccatttcatagtctgaagaaattttagatctttcagtatttaaagcagcaagtttttgtgtttgattatcaacaaaagatttcaatttttcaacattttcttcattggagccttcgattctttccttttcccttgcaattttttgatccaaatgattcaaggttcttttattatcagaaattttctgtttcacggttgaaattttacgttctatatcattaatttcttctttgacttcttgaattatacttttacaactagatctttcagcttcacaaaatttatatttttcagagtaagtatccagctcaccactttcaaattcagctttctttttcataattttatcaacttcttctttaattgaatctttctttatattattttgttccatttcagttttcttttgattaaataatgcttgagcagattttctcttatcttcacattctctatgttctaaccatgcttttttaccaatcagtaactctttcttcgctgtatattcatcagaatctttgaaagaattccaaactttcttagcatcttggaatttttgctttaattcggtataaacaccttgatttgaatctaaaatagttttaatttcacttgcattagtttcaatatctttaatattatcaaaagattctttaagtcttgtaccagccataaaactattgaatttatctttatcagttgaatgagcaaggaaagttttagcttcagtttgagttaaaattgtcattggattagcaattgtaataccaaaatattcaaggattctatcaacagttttcttagttgttgaaactgttttttgatgttcatttttaacaatcaatgaatgaggacgatcatttctcaaaactctttcaacaataatctttgaaccaaattcttcaggtttataagcttctgaaccttcgtttttaattgtaactacagctcttgcaacatttttaccatgtttaattaaatttttcaaagaattaccacgatcagtatcacttgcctttgcacccaatgcaactgaaataccagttaaaattgccgatttaccagaaccatttctaccgataataaaattagtttgtggaccaaaattaagtgaaaatgcttcatgacacataaaattaaataattctaatttttcaataataccagcctctgatggagaatcatcatcttgagttaaagaacctgatgcaaatggtgcctgtgtcattttaccaactgatcttctccttcttttctgtgaccatctttgatcaatttgtgtcattacttctgaaacattcatttctccagagtcaactgcacgtaattcaactgcagatctttcattatcatctaacaacgcgttagccttcaattttttagaggtaattacttcattatctgatccagtatcacgttctaactgtctcttagcactagtcattgtatgtatgtgatgataagtgtttcaacagcttaaaaaatccccactaaagatcaaagattaaagatttagactcctatcaggaaggctctctcttttcaaattcaaataattggcaaattcaaaaatatttttttacgcgtcatattgaaaaaaagcacggtcgatgcgtctgtattttttactaagggttcattatgcatgatcttttaccgttattgatcgatttgatcaacatgaataagagtcatttttatatatttgtttacagagtaagagagactagaacttcttaactgaatttttggatcagtagctattgataattatgtctaagtcatctattgctttgaatgccaaagcagcagctgatggattgattgatttaacatcgcttgatgtaaaatggttaccacgttggaaacaaaaatgtaacggtaaatttattaatccacgtcgtttagtaaatgaatcaaataatccaaaggataaaaagaaaatctactctttaacaatgttcccatatccttcaggtagtttacatatgggacatttaagagtttattcaattagtgatgttttagcaagatattatcgtttaaataattatgatttaattcatccaatgggttgggatgcatttggtttaccagcagaaaatgcagctgttgaaagaggtgaaaatcctgagacttggactaaattaaatattcaaaaaatgaaacaacaaatgcaattaatgttaactgattatgattgggataaagaaatttcaacttgtgatccagaatattataaatggactcaaaaaatctttttagaattatataaacatggtttagcttatagaaaaaaggcagaaatcaattgggatccaatagataaaacagttttagctaatgaacaagttgattcagagggtagatcatggagatcaggtgcaattgttgaaaagaaacttttagaacaatggtttttaggtataactaaatatgctaaatcattgaataaagatctagaattattagaagattggccaagtaaagttaaagcaatgcaaaaaaattggattggtgaatcaaatggttgtgaaattaaatttgaagttgaatctgatgataaatcaattaaactaccattgaatattttagatgtttttacaactagacctgaaactatttttagtgttcaatttttatcattatcatttgatcatccaattactcaattttatgctaaaaatgatattaaactaaaagcatttattgatagattaaataaagaagatgaatcagaaaaatcaaaggaaggttaccaattagatggtttatatgtgatcaatccattagatgctaatattaaattacctgtttttgttgcaccttacgttcttggaacttatggtagtggagcagtcatgggatgtccggcacatgatattcgtgattttgaattttggagaaataatatgggatcagatgccgcccttatatatacagttgatcctatcaatgaaactgatgcaattattgaaggttctgaaccatatgttttaaaagagggtaaaatgaatattaattctaaaatcttagaaggcttatcagttgaagatgcaaggaagaaagttaccgaagaattgaaattgatcagtatgggagattataaaacaaattatagaattagagattggttaatttcaagacaacgttattggggtgcaccaattccaatgattcattgtgattcatgtggtgtcgtacctgttcctgacgaagatttacctgttaaattacctcatgttgatgcacttttaggtagaggtggttcaccattagcacaaattgaagaatttgttaattgtgaatgtccacaatgtaaaaagccagcaaagagagatactgatacaatggatacatttatggattcttcatggtatatgtttagatttatcgattcaaagaatgacaaggaaattttctctaaagaattagctactaaatacatgccagttgatcaatatataggaggtgttgaacatgcaattttacatttactttattcaagatttataagtaaatttttcaatgatattggattatatgataataaagaaatgaaaggtgaaccttttaaacaattaatcactcaaggtatggttcatggtaaaacattcgttaaccctaaaaccggtaaatttttaaaacctgatgaatataaagtaactgaaacaggtgatgcaattataactgcaactggtgaaattgcaggtatttcatatgaaaaaatgtccaaatctaagtataatggtgctgatcctgctgaatgtattagtaaacacggtgcagatgcaactagagcgcatgttcttttccaagctccaattaatgatattttagattgggaagaaagtaagattgttggtgtagagagatggttgaaaaaagttattaaattaggtgttgaaattgcaaataaatcagaaactggtaatattattaagcctaatacaattgttgcaccaattactgaaaatgataaatcacttcataatgaattgaataaatttgaaattggaattaatgaatcattccaaaaaagtccttcattcaatacattaattgcatactacatgaaatatacaaattctttaattgacgcaatgaaattagaagatatcacgcaatcgtatattgaatctaaatatttagatttattaatttacatgtcaccagttacaccagctacatgtgaggaatcatttgaattatttaattatagagttgaaaatgatgaatccaaagaacaatttttattagaagctgaatggccaaaacttcaaaatgcagttgaagctgaggtaccatataatattgttgttaatggtaaaatgaagtttgttttcaaggcagatgaagcatttatgactaaaactgttgaagaatgtcatgaaattttaattgctactgaagacggtaagaaacatttagaaggtgaaaagattaagaaaataatagtgaagaagggtactgttgtcttcatgactgagaagcctaagaagagtaaagcgtctaagagtaagaaataggcgtaatttgtatatagttattcatgtaaatatagttgtaaaaacagttaatgattcaaaatgaaaagataaacttgcggagtcagataatcggatcgggttaatttgagcgagtgctttcaaaatttttgatttttcaaaagaaaataatgtttaactgataacagtctccttgtgggagtgtatagtttctgtttaaccttttttttaatatctcttcattggtgactgcagtggcaaagatagtaagcttttactatataagaatgtcagtacagttggtgataccgaaaaatgtatccaatttgagaaatagggtaaagtttttatcaagtttgttagtcaacccgaaattttacagatatattaacaatgtgctatcagatccttcagttttggatagatcattaggaactttatgttattttatgttgtttgtaagtgcaattattaaaagatatcctaaactgaaaaaagtgtttttaaaagtattcaataaggtaatgatcgtttataaacaattattgaatcgaattatatatcaaaaccaaaatcttgaaaagaatattgaggtaaaggaaactaatgataaggtagaatcactggatggtttatctgataaagaattatcaccattcttagagagtctttataatatgacaaagaatttttcaggttatatatcagatattcgaatatttaatagaggattctcagtccctggatcaattgctgatttacttgaagcatcacaattgctaaaagatggtgattatttaaattatttttcaacagtatgtatatcattatatcaaccatgtgaaacaattgcatttatgatggatcataattggttgttacctgataggaaagcaaatgatccagattggtggtatattgtatcaactaaattttggtttgtttgggttgttgcagaatttacacaattaggatatgaacttttcataacaaacggtggtaaaaatataagtaagaatgaatttattgaatttactgaacatttagctacattaccattatgtgttcattggagttcagaaaatggttggttagatgatttacttgttggattttttgcaactatcgcaggtggattatctacaatagacacatggaacgatattattcaaaaaatgagtagtgaaatcaattaattaattcaatatactttttttattacttttctgtagtgtaaacacttacataaggttatttattatctataaagtagcttagattgtacgaacttttaaagcagaagggaaaagaagtgaaaatgaatttgaagatgaaagtgattgtgaatgtgaagttgaaatgaagaaaaaaaaatgtcaaatgtagtgttaaaaagtttaactgtaaatattagaaatgagcaaaaaaagtatttgaataatattagagttttagattagaaaaacatttaaacggaagaagtccattaattcttttgattatttttaaagtattcccttaaaaactgtaaatgtggtaaaattttagaattacatgcttgatcgatatttagtttattaatatattgaagttttttagctgaagcaatcatattttgatgaatatgtgatgaagcaatattattaggttctaaatcatttggagtataattaacacataataattgtgacataatttcccaaatttgtaattcaacatcataatctgcatctaaactcttcaatgaaactatatgattatttctttcatcaaatgaatcttttaaaacctcaattgggaaatattttggatttgataaatgtaaaaacataaaatcatcacattgtaaatttcttaaattaactctatcaccgtaatattcatttccaatcattggattacattgtgccataccagttgattggaatccttcttcattaaaatatccaataaatgaaagtgattgtctaacttgataaactggtttatctaatgaatacgcggctaaaatataagtgtctttatcaccttcacctgcactaccttgtgatattaaaggataataataattagcaccataaatattaatatataatgctaataataaagtatctgcatgaatttttttattaactaacaacataccactttcagttgaaggatttgggaatgaaccaggtagatcatgaatatcataattatcattttctacatcattaattgacgaataatcaacattaatatggaataagtcaaacatgaaaggattagtggttctaatccaagtatcaggccataaaattaattgatatttttgataaatatcccaattaaataattcatcaggatttttaattaaaatattatcaacatctaataataaaatattttcaaattctgaagctaacattgctaataatttatattcataatttttcaatttaaaaaaaggttgtacataccttaatggtaattctttataacctaaaacacattttgcattaacatattgtaacattgtttcacaaaaattataatcataatcttgaattgtcggtatgaaaacttcaactggtaattttgaaccaatttgtcttaattgatgtatacttaataatgctaaccaagaaaacttcccaccaccaaccattactatacctttactattaataattttagaatcttcattaccgaaaattgataaatttaaattattcaaacctatttgataatgatccaatgattcaaataattgtaatttttgattattatttaagggtactaaactagataggaattttttattaaatttcacgttatcttgtaaaaatcttttaacatcggggttttcttcattataatttttcaaactttgaaattgtggtttactctctattaataatttgaaaagatcagaataaataccatattgatcttttgaatcattcaattcatttataattttctgttgaacaattaaattcttattatgttcacttctaacaattgaagataatgaatcagatatattcaatgaactaaaatcaaagaaatataaaactgttaaatttaaaataaatataacaatcactgcaatgaaaagttttactcgtatcctagcaaaacggagtatcctcataatgtattagatataagtatagagaattcaatcactgctgagagtatatatgtgcaatagataataacagtaatcgatcaaacttaaaagaaactacaagtaaatataggttaaacattaaaataaaataaactttatactataaaccattgtccatatcccagcacaaagaaactcatgatggatttctcgctattaaactaaaatatttttttttcgtgtttcctttccatttcactttctctgggcccttttatcgtgtagttatcgtagtgtttgtgtatagttatgtagttatatttatataatgtataatacaaagaaaagtatgcaatgaatgaatatgtaaaatgaataaaaataaaaataaaaataaaaatgtagttgtaattgtaattgtaattgtccttaacctgatattataaagaaaaaaaaagaatgctatgtaattaattaatataatcaattgatctatataatcacagaaatttgcgtgaaaagaaatgtttagtgttcccttcagatacaggttcaacatctgattttactgcattattgaaaggactggtattatcataagtttcttgttttgaaatattttcaatatcttgattcatcatatcatcacttggataagaatttttatattcattattatcattattgtattcattatcattatcattactatcattatctctattaatataagtttgtacataaccaccataacttgaagcttttaaatcccaagaaataataaacatcattgtaccataataataaactaaagaccattccataattgctgaatacccccaatattttgaccaacgaccttctgaatttgccttacccataaaagcgccataacaaacaactaaaacaattgcaatacaagtccaaataattttaacaattgcactatttctaaaatgattaattttataatgtttataatgaatcaaaaatgctaaactatgagcaactaaataacaaaacacgaaaataacgaataaaataacgaaaactgaatgaactcttgaatattgccaattatcctttaaacatgaaaccattaaaatacataaacatgcaattataattaaagcaattgctaaagcatgaacagcggttaaaaaccaatggaaaattggtgggaaataatttctttcaggagttctaagataataatcttcaataactgaccaaacaaggaaaatacccataattgctgaaccaacaatgaaaattggttgtaaatcagttgcagcgatatttgaaagataaacaatataatgaggcatttcataatgatcagtatctaaaattggtctacctttagcaaaccaacaaatcattaaagcaactaacattgcccaccaaccaaataatgaaatcattggtagtatccaagcatattgaggtttaatattgggtagagtaagtgatccaatcttcattattctataaactattactattatcaaatgaacaaaacaagaaaagatggataaatttaaaaataaacatgcataagatggactggaaaatttaaaaatatcatggaaagggggcttgtaaggcataaaatattatttttttcagggacgatacgtcgtctgggaatttaccagtttttcatctatatttgattatctacatgaatagaatggattattaatatatagcattaatagtttatattagaataacaaggatatatacaatgctggtaggaagattgtcaaagtgttctagaaatatactcaagtctagttttgcatcatctcatttaagatcatttgcaactcattcaaaatcaacaactattcaacctgattcctatgaatcaaataagaaaactgaaacaaataaattagagaaatctttagctaaattttgggaaaaagttactattggtaattcaaatgatggttcttatactattgaattagatggtaaatctattaaaactcctttaggttttgaaatgaaaattccaaagaataagaaaactttagctttcctattagctaatgaatggaaatctttaccaagtttacaaattaaacctttcttagttccattaacttcattaactgctagatgtattgatttaaatgaagctcaaattactaatgatgatgaaattaaaactaaaattggtgatttatcaacaattaaaaatttattattaagatatttagatactgatacaatgttagtattttcaccaagggaagattgtgatggtgaattaagaaaagaacaagaaaaatgttatagacctttaattgaagatatggaaaattttttcactaaattctctgatgatggtaaacctgttaaacttacttatttagattgtgatactgatggtttaattggtaatcaacaaactaaacatactcatattgctgtattaaattatttaaatagtttatcaacttgggatttagttgcattagagaaagcagttcttgtaggtaaatcattccttgctggtgtaacaattttaagaaatgctgattataatgataaatttaatttaacaattgatgaattagctagattagtatctttagaaactgtcttacaaactttaagatggggtgaagttgaagatactcatgacgttgataaagttgatataagaagaaatttagcaagtgttgcaattgttgctcataattcaaaacctgaatagagattaaatcctatagtgtatttatataaataagttcctgtaaataaaataatatattcacatttttatactaattaacaactagattaactgtgtttgttttctactatacattatacattactacacatattaaaattaataaatacattcatgaaataaattaacatcactgacagaatcaaaatttaaaatataatcattggaatcagcttcattttcatttctcttaattaatgcctctctaaattgaatcttatcaatttgctctttacaaacatttaattcaatattaccaaattcaaaacctgttaaatcaatacatattgaattattacccttattttcaacacttaaaacacatctattcaaatcaataactacatcattttcaatcttctttaatgatgcaacacttgtccaatgtttagttgcataactttgttcttcatattgaaattcattaccttttccattatttacattatcattttcaatttcactctcaattgatgaaaaactatccatctttggtaacatcattttatcagattgataacttacctctgaatcataacttccattattattaactaataatgaatcaattatatcaggattaactaaaacattactaataatacgcatatcttgtctattacttggttttatcataattgttaatttattacctttataactctcagttgttgcatgaatatcaattatattaaatgtacaatctgtattttcattaatttttatcaataaaattggtttattagaatctgaatttgtatctaatgatgaaattgttttatctgatatagattttatcattgtattgtagaatcctaaataaaatttatcatctaaacaatgtaagattatactagtttctctactttttgtccatgaatttgatgtccataatgaaattttggcaattgatatagatttggagacacaattaggatttgaaattatacttaaaatttcatcatttatacttgaagaaattgaatgtaatgatttagttggtgaaacttcttttggttttaagtcgggtatattattaattgtttgtgatttgattttattattagatgatatggatgatgatgatttcttctttgaaagtaaattagagaatgatccaaataatgatttcttacgttttggattttcagtacttgttgtatcaatactattttgatatttacttaaatcaagagttggctttcttgtaattgtctttttaatttcagtttctttaacttcagtaggttttggaataatacttttaacaggggttggtaatctgtttattggaggtaaagaaatattatcattttcactaacattataagattgttgttcaatattttcactttcatcatcagaaacttcatcatttgcagtttgaaccagtatttctgtgaaaaagtctctttttgtagttgaatcaattaaatcgggtatattagtttgtttatttagttttggaatttcaggtgtgaattcaatctttggtgatggtaattttgattcaactccaactggttcttcaactggttcttcaattagtgtttcaactgattcttcaacttttggaaccattatacctaaaccaaaagaaactgttgaatgacttactggagtttctaattttgggaagaaatcatttaatattgaatttaatctctcattttgagtatcaaatgtaaaacataattgtattttggaagagtgaattgaatgattgaataaaagtgaagttaaattattttgaatattacctttatgaaattgaaattctgatttttttattggtgtaaaaactaatgttttaccgaaactatccttttgaacgagtaaaatatattctgaggatgttataaataattctaatttcataaaatttaatgatgcactttcgtttatgtttaaataatgtaaatcaacaatgaaaacttcagaattgtttagatcattttgatttaattgaacaccaacatttttcagagatacaatatcctttgcattagtaaaattaatcaatgaatcacatcttgctttttcgttttcatcaatttttctacaattttctaaacatttagtaagtttgaaaataataacttccatatttgaaataatttcactagaatttggtctttcatcaattgtaattaatatatcttttaaattcttaaagaaagtatttaaatatctaactctaatcattggtcttcttctaattttaacttcagtttttgcttgtaaaacatcaagtttataaaattttaagtattcattataattaattacaacatcctttccccaatttgatagttgataaactaaatcatcaaaatctgaattatttgaaataatttgaattaatgatgtatgtttgacaatcatttgttgaacaatatttaataattcattatttttctcctgtcttatagataccatttcattagttatatcatctaatgaagaatcaaaataattattatagacaggatcaaaatctagtaaaattttttctaatattttcaattcaattaagtattcattctctgatttgttataattagttaataataaagtcaatttatcttgttcgtactggtatggatgattatttcccatttgattgatacttgaagatgaatcaacagcttcttgaattgagaaaagtggagttgctgaatatgaacgtgattttttcattgctttacggtgacttttttttcaataattaagtattagagaacaaaagaagtagagtacacagggaagaactaaagtatagcaagagttcttaattatattatattaattaattaattaaatatcaatcatctaataatccagtcaattcatgtacctgtcaaaacgcgtttcaccagatgaaacgtaaataaataaataaataacgcgttgttttgtttacctaatcaaataatatactttcactgtaattctaaaagcgcgtctactgctaaacctgcatcaaatgaacattctcttacaacatctctgataaggttggaatccattgatggaaacattgaaataagtccgttgatcatctcttccttggcattattatctctcgcctctgctaatgattcattctgtgcttgaagtaattgttcctcggcctctctacgtcgtgttgattgtcttgtagaattattatcattattattattattattattattatcattatgttcttctgtatcagcatcaatactgttgatattgtttataatactattgattgaattcgataatgattgtttaactatttctgcactctttgttaatacatcagatggtgatggtgaaatacctgatattgatgaatctcccccttgttgttgttgtaatttttcaaatcgtattttagatttattcatttcatcttgaaattcttcatcgttaattgtaagttgatctctatttaaactaatgataaaattacatgcaatttgcattgtactaacataatatgatgtttcaccaatcaaaaattcctcatttctaaatctttcaatatattgaagattagaatataaatgtttaacctttgaatgaattaaaatataaattaataatggtacaaatgaatctgcattttcctctgttttctcttgttgtctaattaatccaaatattagtttagatgaattaagtatacaaacaattttatcccttggtgatttaaattcatcaatcttacttaattcctttgacgccagcgttatgaatttagaatcaattttaacattaatatttaaatcaagatgtttaaattctatccaatcatagagataagtatttgtaagatattttctatccataattttatcgtgtttatgagaatctgttaatttgataaatgacatacaaggactgaaaacaactggataaacttttgtcatgatcaatttttctaaaccttctttacaattattaattttaatctcatcattattaagttcattaaatggttcaaattgtattaatttattaaataaaaaatcttcaaattctttaatcagtttgacttgttcattaactgtccaaattctttgaccaaattgtctaataaatgattttaaatatttatgaattggttcacaatcttttgatttaaattgtactaaaaattcttgaaaatcaaatgatctttgtttacttaaattagatggtggatttggtatgaatttaattgaattactacgttgctttgctagttgaactctttcttcaactttagagtcattgatattattattagtttcatcatcaatgttatcattttcattttcatcatcatgatcgttatcaattaaattaatttttaaggggttttcactaatatcattacttttctttgataatttgatcttattaacttcattttcaacttctttattaatgatatcttcatttttattttcaatttcattatcagatacatttgtttcattattaatatcatcaagtgtttcgttaattaataattcatcattatcctgggtattattttgtaataaatcattcttatcttgttctttcatacaagctttttcttcagaaatactcatttcatcagatgatgattcatctttagtttcagctggtgcttgcaatttatttgaagtactagtttcaacttgtttctctagctcttctttttcttcttctttctcttcttcttcttccgcttcgtcatcttcatcacttgattcatttaacaacattcctttaccatttgtttcttgtttatttatatcaattatgctactatcagttctagcatctaataaagttttcagagttggacctttcattgttgggatatttgatgtgatatcagttgtagcagttgaaactggagtattttgttctgctgtatcgtttactatctcatcaatattgtcttcattatcttgattgtcttcttcttcttcttctagattttcttttatattatcttcattttccttattaattaacaaagattcaatacttttctgtaatgtaccatgttcctcttcctcctcctcaatttcattaatttccgaattttcaacttcatgttcattaacaaaagatacaggtttactctttacttccgataaaccaactgttggtttcgcattagttagtgaaggtaatacgaatccattcaatgacattgttgtttgtctaaaagaaagaatgattataatagagcctttaaattatatatgcagcaaggagtattatcattgaaattgaaaaagttaaatttctcaatctgtaagatttaaagggaataacaccagccacaataatgattattatatacgtgttctgttctgtattggatctataaagacaatatataactgatgaaatacagtatccttactgttttattaacattatcaagattaatcaattgtgaagataatttagaaatagaggatagtgaaattatttgtcctgatagtaatccattaaattgttatccaaaattatttgaaccaagtattgaatggaaagaagttaaagagggtcaaattataccagttggattagatattagattagatttagataatttaaaaaaaatggcgaaattaacagaaaagaaagatagtaataaaaatcatgaaattgttgtttcaaaacataataataaaggagaatttgattcattaattggatttattgaaggatttgttgaattaacatattctaagacaagttttattataattaaagatcattttgaacaattaattgaatggtcatctgatattgaaactggagttgaaatttcacatcatttccaatcattattgaaaataacaggattgtataacaaaaagggagaagataatattgaagataaatttttccttggtgatgaacaatattcgattattcaagatatgacatatatgatattatcatcaacatttagaaacaatattgaagctcaaaaagttttactcgaatatttgaataaacctgaagaatttttattaaaattagtagaatatgatgataataatttaataattaaacgtaaattaggattacttggatcattaattaataataatttatttgatgaatatgttaagaaagctagaattgaaaaatcattgattatgttgtatagtaaggttgatgattatagtgttaaggaaagtatgaatttacttgaggatatgaagaatggtaatctagacaagagagaggaagaggatgatgctaaagatgaacatggtgatgatggtaatagtgatagcagtgatgtaattgatagtaaatatgcagatatagtacaaagatcaattgtaagtattgaaccaagtagtgaaagtgaagaatataaagaaattctagacattttacataatatgagggatgggaatggtaaattcccaattaaaaatgaatttttagattggttagataaattaattaatcataagaaatcaatcggtgataaggaagttaataagataattgaattaagacatcaagtatttggtaatcgacttggttctcgtagggattatgacgatgagttataagatagggtagatgttgtgaacacgctataagcggtataaacgatattaaacggtatatatagttgtaaatattataaattaataataattatagtgtataaaacaatgctataataaaaaatatgcaggtacggtgagaatatatggagatagacaatagaaacgggagttttgagcgtgttttatattgctatgatgtaataagttaattattaaatttcttgtttatatatataacggtacctgattcctagtttatgaaaaattacagtcttactgctctgctgtgctttctcttatcttattctaatcttatcctgaaaagacaaacaaatttaaataacaataaagaataatgacaacaaatttttatacggatttagtaccaattacaacagatattcaaccaactattagtgtttcagatactattaacactatatcaagtgaaattacaaatacattaacaactcacagaaccagtatagaggataatggtaatgatatatcaatattaacagatacaagatcatcagtatatgatgtactgacgacaagtagtgtaactacaacatcatcattatctacagatcaattatcaagtacagcacataaagaagttagttcgaataatggtaatggtaataaggctaataattataaaaagaatacactagtatggggtatactaggtacatcacttttatattcatttattttatagctttatcttataactttatatacttttatatacttttagataccacatgttcttttaaatgcttaaatacctattactaattaaataataacattacacgtgaccaccaagagggttactgacactcctgaaaggaaaccctcacttaattttaaaaaaacccgcgcagtgaaaaaagaaaaaagagaaaaaaaaatttttcacttacttaatcatatgcactataaatacctaacagtatctctatttgaaaattttcattaaacatattattcttattttcttttaacaaccacagatattataacaatggctccaattgtatgtatacatttctatttactaactaattagttattacattatcaagtctttaatagaataccagttatttaatatttaatatacttttcttattatctaactgttgtttattttaaagccatgtattatattctcattattcatgagtttattctactattctgtgtctaaatccttattaataagggtttattctgcagtaggtatttaatttattcatttgtattctctattatcgtatcttgtaaattgtaattattattattagttaaaggcaggacatctttactaactcattctcctttcttccttaacttaattttacagactaagaaaacttcaaacgttactaaaactttcactgttgattgtgcaaccccaactgaaaacggtgttttcgatccagaatcctacgttaaatatttagttgaacacattaaaattgaaggtcacgttggtcaattaaacgaacaaattaccgtctcaactgaaggtactaaagttgtcgttgtttcttcaactaaattctctggtaaatacttaaaatacttaacaaagagatacttaaagaagaaccaaattagagattggattagattcatctctgttaagaagaacgaatataaattacaattctactctacttcagttgatgaagaagatgaagatgaagaataattctgatggtctttattttattataattataattacaatatagtttataaattattgtcttaatttaaataaatacttgtattcttttctaaatataccctcctatactgttacaataacaataataataatcatattaatcattacgtaatttttaatctcaatgtttatcactttttatcccatttacctcaagtttgatctgattttatactataagtcatcgtatctttcttttaacaaacgacacaaatatgaacattgaagatggttttcacaatgatcatatgctaagtactgattcaattcaaaataaaccaaaactacgagatagtaataatcatttttatagtaatttaaaactatctcatcatattccccaatctcaattaatgtctgatccaatgttagataaattttctaaaggttataataatgatgattcattcgatattgataatgattataagaataatattgatagttcagatatggataatactctaaatgatagtaatttatcagcaaataatgataatttcattgaatatcaattgaataaaccaactaatttaaataaagaaattattgaagaaattaatcatgattttaaacaaatcaagaaagattatattaagaatgaaaacagtaataataataataacataattgacgatgtacagcttgataacgtagatacatcaccaatttcacctacaaaggaattggatataaatgatgatgatgattcaatggatgaatggaaagaaattgatactcaattaaattgtgatgatatttataataataaaggtgaaaaaatagaatttgttcatagtaaagatgatttaacacttgcaaatactgctgtaagttcaactaatttacattctcagaaaaaatcaaatttacaaaaaatttcaaaagttggctcaagtattggtaaaaagacagttcaaataactgctggtgttaaattaggtaaagatgaaaaggaaattaaattaagggaaaaataccaaaaagctcatttaattaattcagataatacaatgcaaggttatactagaattgatgaagaaagacaagcaattaaatttaatgaaatggacaaaaaatttgattttcttttccaaaatgaaaataataatttaagaaaattacacaataataataataatagtactaatgtatccagtgcctcaattgattcagtatctaagataactgatgattttatgaataacgataattttgatgaaatttttaataatcaaggtcgtgatgaaaatgaagtgaatccttcaattcaaatgatgtcaacaaaatcaatgttaacagattctcaaaaaattgcttatgcttcattagttaaattaataattgttcaattgaatactgatttaatcaaaattagaggttccaattcaacgaaaatattgaaaaaattatcagtttctcatacttcatttatgaggtggtcaatgaatataatgaatgaattatataaacatttagatattaaaaataaagatgaaattaatatgattgaaactttaagttgtcatggtgttgaaagtaatgatttagcaaaatcttttgaaaaaaatgtttatattgaaaatcatcttaatgatacaaaaaaagatgataatgaaaaagatgaattaaatttaatcaatatagatgaaaaacaaatacatgatgaaaaaacaattgaaattgatattaaatggacattaatttgtgatttatttttaatcttattagaaacatcagtctatgattcaagaagtcgtactttattaattaattttgctaattcaattggtattgaaacaattgaaatttatcaatttgagagacgtataactgactcattagaaattgatgaagcttttgaaattttaaataataatttaacttgggatgaatctgatattctaaaagaacataaaagaaaggcaaaaaattctaaaattgttaaaattgcattagcaactgccgctggtggattagttattggacttagtgcaggtgcacttgccccagttattggtgcaggtttagctgcaggtttaacaactgttggtataacaggtacaagtggatttttagcaggtgcaggtggtacagcaattattacaacaactggtgtgatgtcaggtatgagagctggtaaaaatgcaatgtcaaatagagtaggatctgttaaaacatttgaatttataccattacataataatagaagagttaatttaattataacagtttcaggttggatgtcaggtacaatggatgatattagattaccattttcaacagttgatcaagttatgggagatttatattcattattatgggaacctgaaatgttgacaagtatgggtcaaacaattaatattttagcaaatgaaattttaactcaaagtattcaacaaattttaggttcgactttattaattactttaatggcaggattacaattacctatgatgttatcaaaattgggttatttattagataatccatggaataattcattagatcgtgcatggaggagtggtaaagttttagctgatacattaagaagaaataaattaggggttagaccaatcacattagttggatttagtttaggtgcaagattaatttatagttgtttattaagtttagctaaaagtggagattttggtatagttgaaaatgtttatttatttggttcacctattgtaattcatgatgatgaaatggcacaagttagaagtgttgtaagtggtagatttgtcaatggttatatgaaacaagattggattttaggttatttgtttagagctacatctggtggtttacgttcgattgcaggattatcaccaattaattcagaagattttaatgttgaaaattttaactgttctgaatttgttaaaggtcatatgcaatatagggaggcaatgccaaaattattgaaggaaataggatgggaagttttagatgatcaatttgtggaaattgaacaaccaaatactagtgaagaagagagacaacgtaaattattaagtgattttgagaaagcacaaaatactaaaaagaagaaaacttggtataataaaatttttggaaggaagaataaagaatggtgggaaatgtatgaagagggtgaaaaggagaagaaagagaaggaaaagggaggtggtcgtgaaggtgaaggtgatagtactgatggtaatgatggtaattttgatcttgaagcgttaaaggaagaaattgctaatattgaaaaagaagcacagaaaattgaaaaggagaagaaagatgaagaagaagtggttgctgtgaaggttgataaagttgtagaagatacggaaaagacacctaaaatagaaaaggaatccgttgaaaatgagattattccaaaaacacaacagaatgatataaaatttcatcttacaccaaattctaataaaccaacagatgcgccaatagaagttaaaaagatacgtaaacgtcaaagtttgatcaaacttgttgaatcaaaggatgattctaaaaagggtgataattttgataaaacggatactctagatattaatcaaaataaacctcaattaaaatcattcaggataagttccaatacatcacgtaaatcaagtttcaataaatcacctgttgttaacttgaatattttccaaccacctgaggttataacaacaaatgtagttaaggaaaacgatgtaaaggacgatccaaatgatgaggtgaaggatgctttaaaggatgatgtaaaagatacaaagttagatttgaaggattttgactttggagaatatgaggaccctaataataatggaagtattcaaataatctttgatgatgacattgatgagattgaaaaaaagattaagatggagcaaagtaatcatgcaggttttggacctgttacaggtataaattatgatgatgaggaggaattcccacaagatgaaagtcatgtacaatttagttttgaataactgacatgtgtgtatttttttcaagtaaaatgttaatataaatttataaagaaaacaaaagtataatgtaatagaagatatataaattaaatagttagaattaaatttattatataattaaatttataaaaagacttcagcattaatttcaacaactgataaagcaaatggaatttcaaagttagctaaaacttcagggtgtaaaacacctaaatgaccaattttaattgcttcagtatcaggttttgctctgaaataaattgctgcacctctacctgggaagaacattttcttttcatcatctgcaactgtccagaaacctcttttgtttgagttttgttcattagtttctaaccaaggaacacgcattgtttgcataattttagttaataaaccttgaataaattcaaaacctgattttttaccagcataagcagctgaccaatttctttgatttcttgcacctctttcatcagttggaactttataaactatatcaccagtttcgaagactttaattggtaatgaatgatttttattttctttaatagttttcaaaatacctggaatcaatgaagttctaacaacttgatattcgatagtttttggattttctaattgaactgctaatgaatcatcattatctaataagaatttaaagttttcatcatgtgaacataaagttaatggcataacttctaaccaacttgcttgagcagttgcagtacgtaagatatctgaaactttattaattggtaatggataagcagttgttgcaacagattttggataagttttgactaaattatcataaccataagcgacagcacaatcttccataacatcacaagcgtgtaatacatcaggtctagttattgggattttaacattaatagttttggaatcatcagattcagaagatgcatctaatgacatttttgataataaatcacagatttcattatttgataattcaagagctaaaattgaattaatatattgggtttcaacatctaaggatcttttagttaaatttggaacaattcttgattcattattatgttcagaaatgatttcgacaggttcaactgagaatggtacttcacaatatcttgaaaacattgcaattaattgattaataacaatttcaactttagttctatcagtacctgtaacatctaagaaaacatttttagtatcaagagtaatttttgaagaatttgaattaataattggaggcattgaacaaacatttctatttgaatctaaaataactgggaaaacaggtgaattttcaattatatgtaaatatttaccaatatttttatcagatttataaaattccattaattctaaaccattcatttcctttgtttgatttaatggagcaaatttaatttcttcaggttttaaagcttcataagtgaaaggaccattaattttatctaaatcatgagtacccattgcaactaaagttctacctctacataaattactatgtaatttatcttgtaaagcaataaatgaatcataagatctttgagtaaatttaatatttctaagtattgcacttgcagcataaggtctaattgataaagttgattctttaattgtaagagttgtctttggagtttcaggtattaattgataatttggttctttaactctacctaaatattgattaagagcttgtgcaataccttcaatacaaagcatatcatatctatttgcaccaatttcaattttaagttgaggtctttcatcagtacctttaacatcatcagttgtatcttcatctaattcaataccaaattggaaacataattcatcgaattcttcagtagtgtaattacgaccaagaagatcgaataaatcttgtttatcaacagcaacggtaggcatatctgacggggttggttgtataaagaagatattaaaataaataattaattcatgaactgttggaaaatggaaaaatcaatagaaattgaaatttactggaaaaaaaaatatctgcgtcggtcggtcggtctatttcccattgagggggttttacccggaaaatagagggcgatttcttattatcagtacatataattgatgcatgttgtatatagttgatgatctgctagatattattattatatgttgaacttatcttatcttatcttcaaacagactaaacaacaagatgtcagctaataagggtaaagcatttgataagtcaatgaaattgttaatggtgggagacagtggagttggtaaatcatgtcttttattaagatttgttgatgataaatttaatccatcatttattacaacaattgggattgattttaaaattaagacaattgatcaagatggtcgtaaaattaaattacaaatttgggatactgcaggtcaagaaagatttagaactattacaactgcttattatagaggtgcaatgggtattataattgtttatgatgtaacagatcataatacttttgatagagttgaaacttggtataaaactgttcaacaacatgctaaagatgatgctcaagttataattgttggtaataaatgtgatgaagaagattctcgtatggtaagtactcaagaaggtgaagaattagcaaatcgtttaaatgtaccatttattgaagcaagtgctaaaaatggtcttaatgtaagtgaagttttctataaattatcaaaattaattttagagaaaagtggtgatgatttccaatcaaatggtgataatggtgataatgttgatattaaaaatggtaatagtaaatcatcttcaggttcagcttcaaattgttgttagttagttttctaattgataacaataataatattagtataatttatattccctttcttacttacttacttacttacttatataatcttcgtgtaatactgtatttatttttcttcaataattaataaggttcaataaggtagtaatagtggtacctttaaaattacaactacaatttataaaacagatagatgtgcgcagtatggttgtttcccaaacgataactgtccagggacattcgcagagaataggaatataccgccacaaattatttcataccttaacaatggcgaactcgattgtaactatacattaaatgtataactacaagaattcaaaccatctaatataaaacaatttgatcaatttacagcccctcaatcgagcaataccctgcaccatagaattggcgatttcaatttatcctcatcaacaaatcgttaaattcggacagggataaacatgaaatctagtgctagcttcacgaggattgacatgcaattacaccaataggatagataataatcaataaatgactatatcatcctatcatctgtattgaaggctgattgtttaaaagaaagtaagtgaaaagagtgaaaaaaactgaaaaaaaaaattttaatgtgggaaaaatctctttcttttatagtgagcgggtcttacttatttttcaaattatggcatttttaagggttttatacaatacaatgtctataaattttattcaggattacatctcttaatggtagcaccaaataactggatattgatactggaattcttagcatcacccgtagactcaatctgttcaaatggtctctctgtaaatttaaccgctattgaatctttatcaatctgttcattccatgattgttgaataatataatattcgtgttccttctctggaatagtatctgtccaatcaaacattgttaataaacttcgtaaattgttattcaaagttggtggtttaacattgaaaatatttgcaattgatgtatatcttgatgcttgttgtgcattattcatattcattgatttattattattattattattaggtgttggggcacttgaatttcctctatttatccataatccgggactactagcattggatggtttattaacactactcagtcctgaaagtgatgcattattggtactattaacaagattgttattgttattgttattgttattattattaatactattactcatcttcatttgaacttgttcatttctctccgtaattaattcagatatacttaccttaatagaaattaaaacatcatataataaatttttcagtttgggattcttctgaatcactttatgattgaacattttcattaaattattaatcaaaacatctttttgtagattaactgatcttttcaatattaattcaactaaaaactccctatgaagtaatataatccttgcaatcatcttaattccaaattctaaatctttactaatacctaaattatattgtctctttcttttaccatatgctattccattgaatatatgaattaatttatctaatactgatgttaatgaaaatacaagtccatcacttaactttaacactttttccttcttatttaatggtatattaattatatcattttcaggtgatttaaaaatctctgtttttccatttatacctaatattggtagtttattcataccatcaacttctttatcaattccattaacatttactgttatattctgtttttgttcttcattctctaatttttcaacttcatcatcactataatcattttgtttacaaacactccataaaatacaacttaataattttgtaacatcaataccattatcaatcaataatttggggaaattttcactatttaaatacatttcctcacatccactcaatatattttccttgcatttgataggtacgtaaacaaacaactctccaattagtttatcatattgattagcatattttttatgaccttctctcattatattttcaatcaaagtattataaaagacgccattagcacgttcatttttcatctgaactctaagataataatcaaaataaaactgtaaaataggtaaattaaaataatctaattcattgacaattgtaatttcattaataatatcgtgaactatttcatcatttaaaatatcattaaatataaatttattgaaattttcatgattaatcatatcaatatccttcaatatatggaaatatttaatgaaaagcttacttttatttgttgcaaattcccaaaatcttgaaataacttctttattaacaaatctaacttccttgttaatatttattggattctcattcaatacttcattaactactttaatatcttgtggtgtttccacaccaacattaagtgatggtgtatctgtattactattagttaaatccagattaagattcatattcatgttaatattcatattcatgttcatgctcatgctcatattattcagttctatacttccggtattaatttcattgatataattacttgtacatattctagtgaatatttgatgatatttttcacaattattcattatgtattgaaatttcaaatatttaaatataaatatttcataacttttattaccaatcacatattcgttattattctctgatatgatggaatagttttcaacagtttcaacttcagttgcacttgagtctttatcaattctaattccaatagaagtgttagcaaattgtccattatcaaaaaacaaatcgtaaaacaattttacttcatcaaatgagttatcaaaaattccagggtcttctttttcagtttcaaatattataattatatcactaatatcaacaaatttataaattagtaattgttgaattatctttaaattactttcatattcaatttggaaagtcgatttaacggatcttttcaagtaatcaaataaatatttcctaaattctaattctttccatttttgtaaacttttcaaatatttaataattatcccaatcttactataattttcacctgttttaacaacattaataaatttcatcaaacagatcatcataaaatgtgaaaattcaaatgtattaactaatttctcatatattggaacttcaataatattcatttcctccttagttataaaaaattcgtcactctcttccatatcactacttacaatatcattaaacgtctcaatatgaattaatgttggaatattggctttttgaatacatttagaaatttcatatttgctatttttttcaaacatcctcttgatcaaaactattaaatactcccacatactccacttcatattgtaaattgtagattccaataagtttttattgattacaatcatttgaattaacaatataatacatctgttatcgatgttgattaatctatcttcactattcaaaacttctaataatatagtcaaaaatctacttaaaccaatttgatgaagttcaaatagttcataaataatactcagcttattttctgtaatataaatttctttagttttggaacttccaataatattttcaaatcttttgatagctgcttcaccagtttcaaaatgtttattttgttgagtaggatcattataacaaaagaaaaagtctttcatgtgtaataatgataaagagctataatcatcatcttttgaatataaagtatctaatatttgtaaatttcctaaacttgaataatcgatatcattatcaacaattctccaattagtagaatccattaatctacccaatatacttttcaaatttgtatcttcctttttaggtaattgattaagtattaaaatatgaatataacaagatctatccggttcggataaataaataaccccggaagcaattaatcttcttaaatatgaagagataatgaatagtttgatatttgataatctattaatcaaatttaaaaagctaattatatcataattattaccatctttggttctaacattattatagttcaagatttcagacatcaaaaatataaaatcaattaccttattttctaaatcagccttaaattgtttaaattttttgggtttagtttggattaaatcagatattttgaattgtaaaactgaacagattaatgtaatcctctgaaaattaatatctttagtaaaattatttctaatcccccattggaaaatgaaatgtaaataagttttccaataatcactattatcttcaaaaattatcttactcaatgattgaatagattcatcctgaaaattgttcagtttatttaaaaccaatgatatcttatcatacactagcccctcagaagtcttcgaattcagcatagatttgagaatcggtactgatggtgtatttgaagaatgtgatgatgatgttaaatttggtataaatgaaggtgatggagaaattggtgaaaatgtagaattgactaatcttgtactaacatttgatgttaaaggacgatcaaattcatcattgtttagagaattgtttctatatgaaataagtttaaattgttcactgacaggaggtaaatccatatctaataattttctcaaaaaaggtttaaatcgattccaattatttggtattatgaaaatatcagagttaaaatagaataaatatttgatcatttcttgaaatattttaacaagtttgtttactattaaatcaaattttgtatttttcttgaattggctactgtgaaataataataataacattgattcacttaactcttttgttaaatagtcatatttaatgattttaaaccaaaacattttgattattgtatgatgtatcaataatggacgtatatctgaaattgaattgattttattgactgttgacgaggtataacgaacaatccaagttaagaacgtagttctattcattaaattttcagtatataagttaacaatcaattcgattgaataatttactcttggtctccaatttcttttctcagaatgttgagtgaaacaactttcaatgattgattcaaaaaatgcagttatctgttcggtccattcaactatccatttgttaacatttaaagttgttgatatattattattttttcttcttaattgacgttgttcacttgttgaaatacatttaattaaccaaagtgctctatgtatgggtatattatgaaataaacattgttcaagtaaaaatttatttcttaaaccatgtggtattgctcttgataattcttttaatggtatattaggatttgctaatttttttaaccatgtttcctttttatgctctgttaaagttacccttgcaggtggtttataaacactattagatttaattccattaaatattttcctttgatgcattgcatcaatgaaaacttgtcccattatatttaatctactttgatttattaaattattgtctttatttgattcattgtcgaatagagttgataataaatgccttcctgactgatcctcatatttaacaaattggggttcaacataacctttctgtaaattattttccattatttgatcatccttcttcgtttgtttccatacatggaaatctggatataccttttcctcttctgtatcactttgcattgaagaatcaattattccagcattatttcccttatcttgatcgtttgagtcccaattcaatggataaactccattaggatatggaacttcaccatcatcagcatttaaaactaccggaacggatgacatggcgtattttctctgttccttgctttaaccttcccttataatcaccctgagccagcagctattgaataattcctgctgtggagggaaactactataagaagtcggattacgtaactgcatattgaaaattaaagtgacaccttcaaatttaaaaccgtaacgattattatcggatcaatgataagagttttaatggagtttacttagatagagtacactcttggtagatcagggatatacatatgaatattaggaaacctttgcagtcagaggtacagctgaaaaatcctaaattgttgaatgtggcgtttaatcaagacaattcctgttttgcggtatgttcagagacaggatttaaagtatttgcctcatatccaatggaattgaagatggagagagatttctcaataacaccagataagaagaatgtgattgataatgaaagacatgtggaaactaaattccctgtgaaaagtataaatggtaatgagtttaccggaattggaattattaagatgttatataaaactaattacattgcattagtaggaggtggtaaaaaacctaaattcccaattaataaagtttacatttgggatgattttaaacaaaaggaatcgatagttcttgaatttaatacaccagttttaaatgttcatctctctaggaaacacatttttattattttaaagaatttttcattggtttattcatttaaatcaaaacctgaacttctttactcatttgaaacaattaataatgatttcggagtgagtgaaattgttgtttatgagaattcttccctatttgtatttcctggaagagttgttggtcaattgcatgttgttgatattaataacacaaacactgtgatggctaataagaataatattgataatggagatgatggtgatgataataataaagataatgacgatagtgataaaagcaaaaatgatttcacgatagtaaccaatgaacgagataaagaaaagaagagtattgggttaataaaggcacacaagaatccaattcaatcagtttgcttgtcaagtaatggtaaaatggttgcaagtgcatcaaaccaaggcacaattattcgaatacatgatacaaagacatgttcattgttgtatgagtttagaagaggtgttgacagtgctattgtcactagcatgaaattttcacctaataatgaaaaactagctgttctcagtgataaaaatacattacatgtttattatatccaacctcctgatgcagaaaatggtggtggtggtggtaatggtaaccctaacacaaagcatattcttaaaaatattccattgtttaccaaatattttaggagtacatggagttatgtttctaaagatgttggacataagactgataattttcatgatattggagaacttgggtggtcagatgataattctatcataattatttggaagtttaaaggtatatgggagaaatatgatattattttaaatacattgcaattggataatagtaaagattcaaataaatggaaaattgtcaaagaaggttggcgtagtgtataaactaaagttgttattagtttttattcttgtataatattagaattgttttttatagctttgattgaaaccaatattgcattgaaatgtcagcactaacgtgaatatcaggactcattaatttgacaatacaattggttatataacaactaagtcctgcagattgaaattgactcaaaactttatctgcaaaatgatgatcaacaacgtaaactattattcgagatagtttataatctgtgtaattggaagtaagacatagtatattagctataagattgatagtttgtgaataaacatctcgttgaatatttgatgagtgactaataatcggtaaaacccctaaggtaagtattctaccatcattgttgtgatgcatgtaagttagttcattaaaatcttgaagaaaaggtagtgaagtgcatgcatggaaatctaatgcctggataaattgaatatacgattacttaatcagtttagatttgtttctactggatactgaaagtttgatataaccactttgatggtcaatatttctataaaaaggatcactaaatactctataaaatactctaatgtactaatctagtggggccgtggtcaatgtactttcacataaggtctataaaatttctgcttcaacaattggcaaagattcctgataaaagagatgcattccattcattcttgagacacactctaatgcattttgagaatctttaaaaatcaacacccatgttctgaatgaggtttctttctcgatgtaaacgcatcttgtattttcaaatgattcattaggagtgaaccattcaagatcccataaaaattgcttaaatccgtgtcttgatatctggaatggtacatttcttacaataacacaatatgaacgatcaaattgtggaaaatctatattgtttttctttaatttgtcaattaactttgaataatgactatgaactttagcatttgaaaatgttctggttttcattttgtggaaaagagattcaagtgaactattaattttagccttttcttttgtaaatgttttatgttctgattgttctgataaatatgaattttggcaatatttaattaaatttggtatatctgatatttcaggtaacattgggaataataagaatcttaaactattgacaaaagtatcattacaaatatcaggacttaggacaagaccattcaatgttctaatatcttctgatgggtaattatttaaataagaattagcatcatttagtgaatgaaattcaatgaaatattgtgaattatgtactaaattaaaagaatatcgtccattataaacatttttaaattctatattaggactgattctctgtaaatcttttttgtttagccatttattggcattatatacttgtagtattggtatagttgattttactgatgaatgttgatgaatattactggttattttatcagtattattactattactagtatcaaagtggaaatcaaacatatcagcagtatctgagttcatatgaggaagtgagaggtccccactctttggcacattcaccaatttcctgagcatagctctctgtatctctctaaatgatagcgatgacattgtctatgtggataagctataagctataagctatatataccggtaaagaaagatgaatcgaaacacaactttaacgatgtcgtggaaaatgaaaatgaaaaaatgatttttttcaacttggaaaagaaaaagtgaaggaaattgaatgacttttctttatctgagactgagagaattaaattgtggcaaattattaattatgattatcgatggatgttgtttatcgatttttattattcattctttattctgtatcaacagttagttgtcttatagtccattagcagcatctcatctgagtcttgtacatagcccacgtctctcctgccatctactcttgtacaaataccttatttccttgtccatattttatattctgtgttatattaaattccaattccaattccaattccaattttatttccaatttacattccaatttacatttatatttacattcatattttacaatttacattcaactttaccttttaaataacattctctttcatctgcttgtttaatcttttagaaatgacttcttggaataataattataaggcttcatcaattgatgaaagtattgtatcaaatccttgggaaaatctttcaaataagggcaatattacaaatttagttgctccaaatccaatctctccaattatttctcataatcaacaagatgataaatcaattcaaggtttaaataatacttcaaatattgcttttaatcaatcttctttcttaaattcttttgcttcaactaataaatatcccatgattgatgaaaatgcaattagtgaaactggttctgatgctcttagagatgctatctctgcaatttcagctccagttgcaactcagcctttaaataaatcaagatttggtgctaatgtttttggaccttcaactgtcgctggtgttaatgttaatgttccacattttaaatcttcaaattcaaccttcttggaaaaattctcttctgttactgaaaagacaaaagaattagagactaaacaattgggttcaagaagatcttcaattttcaataatgaaccaaagtctcctcaacaattattcagagaaccaagaaaacaatcttttagtgaaaaattagaatcttacatttctgctactgcttccccaagtaattcaagacatttatcattcagctctgaaattgctcctgtaaataataacaataacagtagtagtgttaatattagtatgaaaaatatgactattaataatactattaataacgatattagtagttttggctctgaaaatctttcaaatcatgaaaatgaaaaagctgatttcaataatgcaaacattaatggctcaaattcatttaattttaaaacaagttggaatcctgcaactgcaacaccattccaaccaaattatggatcgattccggaaatgtcatatttacaacatcaacaaccaatgattgttccttcttttcctatgatgggttctcaaggtatcccaaataatggattttatcctcaaatgttcccaccatttttatctcctcaatacatgatgccaaatggtactccaaacactggtgctgaggaaatgaaaccttcagacactactactagtcaatatggtagtactaattctgatttagatgatattaaaaataatcaatctaaaacagattttaataatcaagttgaaaatggtaatcaaaacaaggttgataacaatgataatgaaaataaagattcgactgaaaattcaaataacaattctaacaataataatcaccatcctgatgttttcccagttacattaagtagatcaggttctccttatattatggcaccattcaatccatatggtatgtttccaccaccaactggcggtagtttcatttcatctcctggttcacctattggtgcagtttcatcaccacctccaccaggtatgatgatgccaatgcatatgatgggggttgcacctgttggtccaagagatggtaaaggtacaaccggcacaccatcaaataagaattcaagatcaccaatttcgtcaagtggtagtaaaaagaatggtggtaatggtaattataaatctaataaatttaataaaaacaaacatattgttagatcaccactattagaagaatttagaagtaataaagattctaaaaaatatactcttagagatattgcatcccatggatatgaatttgctaaagatcaacatggttcaagatttattcaacatgaattagaaatcgcaagtgaagaagataaagcaatctttttcaaagaaatcagaaataattcagttgatttaattactgatgtttttggtaattatgttattcaaaaatattttgaatttggatcaagtgttcagaagaaagttttatttgaatccatgagaggatcatttaataatttatcagttcaaatgtatggatgtagagttgttcaaaaatgtttagaaggtattccattagttgatcaattagatattttagaagaattaagaccaaatattttgaatttagttaaggatcaaaatggtaatcatgttattcaaaaggcgattgaaaaaattcctattgaaaaaattccatttattttagattcattaagacaacaaatttatcatttatcaatgcatccatatggatgtagagttattcaaagattattagaatgttcaaatattgaagatcaagaatttatacttgatgaagttaagaattttatctattatttagttcaagatcaatttggtaattatgttattcaacatgttattgaaagtggaaaaaagaaggatactgatattattttaaaagttgttaaagataatttaattgaattatctaaacataaatttgcatcaaatgcagttgagaaatgtattattaatttaccaaaggaaagtagaattgaaatttatgaaactatgttaaaggataacttaacagaagaaggagaattaaatgaacaatcaaatttaatgttaatgatgaaagatccatttgctaattatgttgttcaaaaaatggttgaaattattgatgattcaagaaagaaatttttagttatgaaagttagacaatatttgaaattaattcaaaaaagtagcaatggtaaacatttagcaagtattgaaaaattaaacaacatatgtcgtaactacgattagttattataattatgacatccttttatttccttgtatttttgttcttttataattagttacatatatacagtatattaacaaaaccgattatattctacctttattacgtaatcatttgaagatttgaaattttcctcttctcagctttttactaagtaaaaatatttttttcttgaaaaattaattgtgaaaatttctttcatgtttaaattatttaatccatctgttattacccacaaatcagcataatgtcattagtagaagatagagattctagtacggaattggatgatatattcaatctattgaaaaaaaccagagaaaatagtaaacagaacaacaaagatagtgaaactaaagataaaacagaaggtaaaaataaaaaggatgaagaatatgaacaattgaagaagaaagtaactagtttaccaagtattgaattacatttatttaaaaaagaagatgataaaaataataaaaagagtaataatcgtaaaattttaaaaattgatgatagtgttgagagtattttaccagataaatcagataagacaataattgatcgacgtttaattaaggaacaaaattccaataaatggttttcattacctaaagttgaaatgactgatgaaattaaacgagatttattgattattaaaaatagaaaatatcttgatcctaaaagattctatcgtggtgaaaaatgggaaattccagaaaattttcaaatgggagaaattgttgaaggtgttggagaatatggtggtaagatcaaacgtaaacagagaggtgcaacattagttgatgaattattaaaggatgataatacaaataattggtttagtaaaacatttaatgaaattcaagttaaaaagaagagtgggggtaagaaatttttgtccaataagattgaaaagagaaagaggcgatagatatgataatataccatatgatttatgtagctaatattgtcatatagtctcaactttatctttaatctaatctataataaagttcattaatgtaatgtctaatattacgtaatggatgattacataagaaaatccgaactaaaattaaacccgagttagaaaacatgaattccgtaggtaccgacgtaaaaaaaagaaatttaatataaactccgtcccgcttttaataactcacggaaaaaagggtagcaagtgtcctccgtattgtatcttggtattttcatcgaatctttcaacatttcacaaattatttcctttcatatcaacttagtagtgaaatttgtattgaaagtttgtatactcttaactcactttaaattttgtttttcttgctattcactattaaatatcttgtttcatcaaactcttagttgctccgtttcatttactaaacttgctttatactctctagttatcacttgtatcttattattgcttattccaaataaagttggtaatatgcttctattgtaaatttatttcaaacttacttctttcactatgtaaaatgtatttttgctacatatacgggaaaatagcaacataattgtaatatattaatgaaaatcaaaataattttatgcacactgtcttaaataattgtctctttttgtctttcaatatttctattatatagtctcactttcactttgaaatattgatcttcttataacagtaacctatttagagactgtggtaatgatatatagtatatatagtaactgaatgttgaggatactggttgtacttgtgataatatgaaatttattattcacacattaatggttttaactgtaacgctttcaatttctttacacttttattgaaaaaaacaagctacaacattgctattaatcactccatgaatgaaataatttatcttgatgaattattaaaattgtttagaaccgtttaattcaacatgcgaaattctagaaccatatctgataaataacgtctaatatcacattcttaaccagtagataatcgttatgacacctgagatagacgaacagttgaataaacttagtttccttggcacttgattaatatctgtcactggaagaatgaagggttcgacttaaatacctttaatggttgattacatttataaaatatggtgttaaacaccttgaaataagctatactatactggaaaaattgtttactggaagtagtgaataactatacctatcaccaaaatttaaatacagaatgttttaaagaaaagtatgatacagtgttgaagtgtttgttgaagatacataagattggaaataaaatataataccagcatagtggcatagtgtttattgaagcaaaatattgtttgacaaagcagtgtatgaattcattattttgaatcaattttcactagaaatgaagtatgatataatatactggaaagaaataaagaaactgtttattggaattaaagagtagtatttgtttgatacaaatagtgtttatcgaaaaaagtttctatcagaagttgaatactatgtataggaaagagaatgtttactgcaaacaaagactttagtgcttatcgttcaatggattatgatttatttgaactacttgattttttaataaacacaatattataacatactccaattcaaggcaacattttacaatagctattagtttctatgggtattatttttataaattataaacaatattttttaaacaattaaaagaaaagttttctaatagaacagctataacaaaataatgtaaacggtatataaaaaaccaaaacaagatatagtaaagattgaaaatgtaataattaaataaattaaatacgtctattattatattcaccaatttctcttcttcttctaagttcagcagctgcttcagctgcaccaatttttttaactaattttgtatgaaacaatccacaagcattacataaagttttagcatcttctggtcctttacgccattcaggtgttgaagttgaaccacaatgttgacaaataattttcttttgaatacttaattcaggttgtaatgttccatgtgaattaaattcaacaattgaattaaatttagtatttggtttaaatggtacaacttttaaaattgattcatcattatctttaaattttgaatgtaaaattggtggttgtaattgtgtgggttgttgttgtggtattaatgttggtggtataagtggtaatgatgatggttgtggtggtggtggtggcatattcatacccatgttcatatttatacccatacccatactcatgttcatgttcatattcataccatttggtccaccaactggattgattattggattagtattattattataaggattataataagttgtaagtgctgttgttggattattattaaacgttgtataaggttgaaatactaaatttggataattttcaattggtttaatttgataatttggatctttgattttaatccaatgtaaaaatgaatttgccaacgaattaaaagttaaataaagtttctctaattcaattatcgataaatgttttgtaaatttataaaattcctcaatttcataatttggatcattagatttattcgaattgccatttgtacttgaattttcattttctttctgccttgttctcatatcatttaaataacctttcatatttaatttatgtgagaaaaaatcatctaactctttgaaattttcaattattggatcagtttgtagtaaggattgaaaaatttgtgcaggatgaataggatatgatggaaatttgaggaaacatttaggtcttgattctttgataccatcagtagaattattattattactattattattaagatcattcaaaatattgttgctattctctcttatattcttcaaagcactacttattactgattcccttcttttatcaactttataaccatcagtatttattgaattttttctatttttaacattatcaatatcattagttgttgaagttgaagttgatgaagatgctacattattatcattactttcaactttctcaatttttgatgttgtaattgatattgaattggattttgaatgatttgcttcattgctattatttgaactattattgaaatcattcaatcttaaaattggttgaggtggtaatggagtattttgaaaattataatatggtagcatattattttgacttggtggtaagtaatattgttgctgttgttgtggtggtggttgtttttgtggaatgaatgattgttggggtattttattgatttgtgacatttgtaaattactattcaatacatttgaattttgttgaggtgatggtagttgtgacgatacatgttgagtttgcacatgctgatgttgcggatgttgattttgttgattttgctgtggttgttgattctgttgttgttgttgttgttgttgttgcggttgttgatacaagtgtacttgagatagccgatgattttgatcaatatattgagttggctgatattgtggtggattcattaaatgatagggatagttattttgagatgtatgagatttttcgggatttgtaattgttgcataatgatgttgatattgtggagatacattggatggtagttgctgtttagtattctgatgttggctatactgaggattttgtgattgttgttgttgatgatgaatttgttgatttaattgatttttttgctgtgatattatattttgaatattcccaaaatctgatgattttcagtattaataatttgaggtaattgttgaaattgatatccataagcagaataatgatcttgttgttgtgtaggttgttgttgaattaattgtggattttgaaaagattgctgctgccgttgttgcggcagttgtgtttgatattgggattgtggttgcggttgttgctgattttgaggttgttgtgcctgtggtggttgcaattgatgtggagattgttgctgtgactgttgggattgtgattgatgcaaatttaaattgctgggtaattgattgaaattagacataattattttttttttttaatatgatgtttgttttgaaaaaagtttcaatttccaaaattttttaaagataatagtgaatataatatacaagattgattgatttgattaaaattaatagtataatgagtgtaatcaaatataaaaatactgattcaatgtatgattttgtatgaataattattatacaatgtgaaatttgagaagtcttaaatgcggctaaaattatgaataaaatttaatattaaaatgattctttacttcttctctctattataacaattgctaattaaagtgtatagtattgttattaatatgttagtgtgtatgtattatatgtaatatctttaatgtgtggatattaaaaattatatgctgataatatatgatgtgataattaacttagagtattgaaataatataaattaggttatagcgataatagaaaacactaaggtgacaaaattattagtatatctttcggagttataatctattatagatgtagtattgtagtatatggtatagtaataaattatgatgaataatatggatatagatagatatacaatagaagaatatcgatatgatgatagtggtgatggtggtgatgttattggacaataatgggaaatgaaatcgtatatgtgagagagtaaaggtaaattttgaagattggataaataatagatggaaaaaggttaaaatctttaaaatcttaaattaaaccggttaattccgtatataaaaaaacaagagatttgacaattatgaatcaagattagcaaatgcaggataatagtaaaaaaatggcaaaaaatgataaaagtaccaataaaaagaaaagagaataaggaattatagaataaaattctgggacataaagactatattaatagaagtagtggaaattaatatagaattaattttttatagtaaatatagaaggaaaggctaataaagtaaagaaggataggttgtatggaataaatttattatatcatatgagttagcaattatatacctataaaatgaaaaagtgatcaaaggacgttattatgatgtaataaaccatagtagtgtaatatagctttaaataataaaacaacatgaaagtataattgttaaattaatatagttaaataataataaatataaggagtaatacgaaatagttctagaataacttaatgagtacatgtacaattgactcaactaacactttaatgacatgtgttaaattgaataagtttaattattaatcagtttgctaaaatgtcaaagatttctgggcagaaaaccaggcttaattatgatccattgtcaatatagactaataaaaaacaacaatgaaagttaataattaataacaatgatactatttattaaaaacggtttagtcacttaaacattgcgtttgatctgtaaatccggacctatgtattgtttaatctctgatccgataaaaggttacattgcattggatttttatagttgttgctaaatacaatttttagttattttaattatcctagatactcatatgatatatacacttcaattttgatgttacatgtatcttagttaagggatagtatgactattaattaatatattaatgggaaaaaaaatcatatgttaacttacaagtaacaaatgaaaaaagttggaaagttaaagtaatttactattgttatggataattgtaaacgtattcggtgaaccattttttttgtaaattgcatcagatttacctgatatattatggcttaatacaatactatataaacatttaccgaaatcttttaaaatctaggaaccaaacttaaacaataaaaaattttcgtaaatgatagggtttttgatataattttgatatatttatcttgtaaatattcaataaatctatataaatgattcttgttcttgtacctgttacaaattatactatgaataacggttcaatttcgggatgaaaaaggaccttgtaaaaagggggtaaagtgacgttttacatcattaatagtgtcatcaaagccaacaaaaggtgaaatatgtaataagggttataatttatttcgttaatttaaacgttaataagaaaaaaataataaaaaataaatggatgacccctcaaggttaattaatacccttttaataacatttccttttctaatcttatcttcttcatgattatataccttctttacatctggctctcttctggtaggtaagatatgcttattgtagttcaatgtatgaataaagctccctgtaaatgatggaaattctaaaaaaaaactaataaattatagtttttatacatcacttttatgatagagaatgtagaggttttggattcacctccacttgcaattggagcaggttttgaatatgttttagagtatatcaaacatcaactgttttcattgtttcaggtactgattcaatgaaagtatcggtatcaaatgaaattgctttattacaaaggcaggtttttacaaattattatgttaatgatatatataccttcattctgaaacttttggataatagattacatattatattatctcttcaatgatcataatgatacattaatatatgggattattggataaatcctacttagtactacatattttagacgctaaaaagcgcgatttttttttatttcctgaataacatctttaggactttccgcactaacaaatgtagccctttttcttatctgacctctagttatcgagttatagccctttgaggttgattttttcgatttttcaaatgttcatatctttttctttctggatcattgaaacacgctcaataggtcattggatttggaattgtttgaagtttatttagtaatttacttgggatcattggagctttcctccgtccttgaaaggaatttttagttttttgactttttgtccatttttgaccactttcaactgactctggctccttcaaatacccctggaggtatacttttgaaaaattctgtgtgtaggccgtattactctcttcccaatgacaccatttttagtttttcaagtaagggtaaagttcattaaatatccatttttcagtgatttttgaacgttttttttagaaatttttcaagctagcttttttgttactttttgttaacaacttttaatgttcagaaactcattttgtagatgtgtttttaaattataaactgatgtaaagtatgatttgaaatgttttttcaaaaaaatgttatcattaaatgtgtgcaaattttgctcatttttttggcaaaaaatattaaaacggtgataacttttttttgaggaaaaattggagatgagatatttgatattttgtagataaattttttctctttcatatggtactattcacacccaatttaaaagagattgaaaagcgtagttccttaaattaacgctgattttaacgcttttcaaatagttatagtgatagttgattacgtaaacgcgtatctaaaattcatgtaaccattttttcatgttacaaatttatttcagtgtctacagaattaatggattctttacggtttacatactcaaaggtttactattgtggtgacatttgttattattagcttgttatcaaaaataaaatatgtagtagtaagtaggggtcaaaatttcctgtagggaaattgaaattaccaaacccaacgctttaagcgtcagtttcccctttaggggaaatgacaaaagagtcgattaggttcgtcacgcggaaactagtattgcagcatattatttataagcgactaattattcagtatataccttacattgttcaattgggttaacttcattaattaagtagacaagttgttacgtaatcttccaataattacaaaatgaagcattaaattactatacattttcattacatttcatatgaactgaactgaactagtacttaaatctgaagagtcctgttgttgaaaagagataaatatttccaatatagatgaatattggtgaaaataaccctccaagtagtaattggaaataacaatttccgctttggtaatttgctcgtgtgagttaattaaatattaattactactatcattacaattagaatgcttattatttgctcaatttgctcattttattcttccttgtcgtcctatttgattcattcaacggtattcaacggttcaatttatatgctcatactcatgtaatgttcttataaactaactatataaataattcatctattctgctattatgcacaatttctaattgtttttcctaaattatcatattattattgttaattcaattcaatcaatttaataaataagaatggaagcagatccttggactggtaaagatttgttatatgatggtgtttggtgtatcaaagatatgggtacaccaaaatatgacgctttacataaactttcacaaaaaacagttacttatatggatcaattcaaatatggtcactatttattatattttattacagttataatttcattatttataataaaacgtttaatttattttttcactgataggaattctttaattgttaacaaaagttcaaattattcaaaaaattggtattatagagtagctgcttttaatagatgggtaagttatagaaggttaccaagttatatttgtgagatttgtcaattaccttcatcattgggtaatttgattatcattttagcaggtttaatttacatgctttgttatacattcatacctcatttttattacagaggttgtagaggttttggttcacctccattagctgtcagagcaggtattgaatcaattgctttaataccaatttcaattattctttcaggtaaaactaacttaatttctcaattaacaggtatttcttatgaaaaattaaatgtttatcatagatggatttcaacaatgtcttgctttttcgcctgggttcatacaattccattctatattcaagctgttagagaaggtggtattgcaagattaagctggtttatgggtcatgatgataatttatacagaaatggtatagctccattagttttccttactgttttaaccattttttcacattcttatgttagaaatgcttggtacgaattatggttacaaattcattggatctgtgcacttggtctttatgtttcattatttattcatgttcacggattaagggatggtaccaaatatatgattgcaacaattgttttctggtttactcaactagtttggagagctgttaataaatcttttatgagaccaaataaaggttttcttagagcaaatacgtgtagaatgaagaattttcattcaaatggtgataatcattattttgaattaattattgaaaattcaaatgattttaattggattccaggtcaacacttattcattagagttactggtttaagatgtattgaaaatcatccattctccattgtctcctataacacaccaagggaatcagatgatataaagttaattattaaggccagtaaatttggtggtataactaaagatatctatgataagttaaatgatattgattataccactagtaaggtaatagttgatggtccatatggtggttgtgaaagagcaatcgatgcatttgattctgctttcttattttgtacaggtactggtgtttcagcagttttaacatttttacatgatgcatgtgttaaaattgaatcagctgataatgttttaaataatgtcacatttgattgggttattagaaattttgaaaatatcgaatggattttacctgaattgaaattgattattaacaaatacaatagattaattgaaaatggtaatgttaagatcaatatttatttcaaggaggaaacttcattaaatgataaaaatgttttagaaaatatcaaacatcaattattcacaatatcatcagtcaatgaaggtgaagctacaagtgagagtgaaactgacgaaaaacatgaaaatgaaaatgatcaatcattaaaactggttaatttagttaatgaaaagccagatgttaaacaattagttaaggataagattgatttattgcagcaaagaaatatattcattgtttcaggtactgattcaatgaaagtttcagtatcaaatgaaattgcttcattacaaaagcaagtttttgcaaacaataatattgatgaaatctatcttcattctgaaacttttggatggtaatttatctgttctctatattcattttaactcactatatatactgtacttatataacttacatcgatacttattatctactcttgatcacaggtcaagtactgttgatacttaacataatttcgataattttatcaatgctaagcgagtattttttccctttgtttacatttcataatttaacatcaacatgcatgaatttaagcatgaatttcttctattgtttacaattgcaattgcaatcctctgtaaaagtaactgtagaaattgtgataggtcacattttcccacattgttaacaatccagcactattgatatataattaactataggatcataaacatactcttttcaataatatacacatcattatgaagaaaacttctagaattcctcttcaaaagttttccaatagtagtatctacttcaattcacaacagaatactaatacgaatacaaacaaacgacagaaactatcaacagagaaaaataatattaaaaaaccaacaacaatggcatcaattattcaaactgtaacaacaaatactaaaatgcaaatggatgatatatcaaaattgaagaatgataaaatgaatgatttatcaaatctcaactctgaaatttggaaaattcaaacaaagatacctgatattgaattaaaattagagaaattaaatttaaaattatcaaatgtaaaatcaaatttccaaattttagaatgtaaaattaaaaatttatcatttattaaaactgataaactaaattcaattaataaatcatttgaaacttttaaaaaaaatctgaatacttcatttgatgaaaaagttactaaactggcacaattttatgatgaaaaagttactaatataattaatgaaaaaaatgataaatttaaaaaaatcgaagatgaattacttaaagaaattgaaactttacaatcttcaattaatgattattctgataaaatactaaatgaatcaaaggaaactatcaaaagtgatattaaacttgaaatatcaaaatctattgaaaaacataaggagaatatgattaaaatgaatgaaagtatattgagttttaataatgatattgtaaaattagagaaaaatattgaagatttaagtgtcaaatataacacagaaacgaaaactaaactgcaagatgtagagaaggcattagaatcactaaacaatgatattcaaaatttacaagatgaagaaattgaacttaattataaattaagcacactgaatgactccaaagaggaagaatgtaataaattattaaaattacaagaggaaacacgtcaactttcaaaggaaactattaattataatttaatgataaaggaagaggaacaatatagaagatttttacataatcaattacaggagatgaaaggtaatatacgagttttctgtagaattaaacctgagaaaaatattgataatacattcaaacgtgaaattcaatcaatgatggaaacttctgatctaaaagaatcattggttattagtgaacctgagaatcataatcctaataatagactaacagcatcaccaactaagaaaactaataaacaattttcattttcatttgataaaatatttgatgaaagttcaacaaatagtgaaatatttgaagaaatttcacaacttgttcaaagttcattagatggttttaatgtttgtatatttacatatggacaaacaggtagtggtaaaacatatacaatgagtaacttaaatgatggattaataccaagatcaatgaaattaatgtttgaaaggataaaaatcttaaaatcattaaataaagattatcaattatatggacaatttttcgaaatttatggtgaaaagataaatgatctgattgatgattcaattaataaaggtattgaatttccaaataaattatttgatagtgaaattaataatataaaaatgattaaacttgagtcaaccaatcaaattggtgaattattagaacattcaacaagtaaaagatcgactgcatttacaatggcaaatgacgcttcatccagatcacattcaatttttcgggtttatattacaacaatcaatgaaaataatgaaactttattaattggaacattaaatttagttgatttagcaggtagtgaaagattatcacaatcacaagttacaggtattagattaaaggaaacattagcaattaataaatcattaagttcattaggtgatgttatacttaatttaaaatcaaaatcatctcatataccatatagaaattctaaattaacttatattttaaaagattcattaggtggagattctaagacgttaatgtttgttaatataagttgtttaaataatcattttaatgaatcattaagttcattaagatttgcaagtaaagttaataatactgttttaaaatgaagtatgttcttcagaggggggggggggttcttttttactatgtacattatttataatattatatattgttctttttatttatctgatataagtttaacatcaatatgaggtttatcataaggatttgctaacagatcaggataatctaatttattatcctctaattgaccagatttaactaagttttcccattgaacagggaatttttccatacaatattcctttaattcattccttacaccatcatgtaaacaattattatgtaaagttttcaaaacatattcattaattaaatgatgatcaccattttcttctgcaataattaatttatcaaaagcagttctaaattgttcaaaataacaatttgctatcaaatattctgcaaataaatttgaatctggtaaaatttcataagttgataaattgttataaaaatcatttacatgatctaaagttgcaaattttaaagattttaacatccaataagctgattcattatttgtaccaatttcctttggtaatgaaaatgataaattgaaaacatcacgagttttaaaaggatcatctaatgatgaataagcttccattaatgaattaagtaatttaatatctaaattaattgataaatccattttaattgctaaatgtaatttaaagattgcatcctcatctttaaattttgagaaacttttcaaaagataaatataaaattcttcatttggtggtggtaattttaattctttactctgctttttcatatttgcaaatacaattaatgccatttgaggatcattattatcaataaacattttaacaaaatatggataataatcataaggaatttggaaataatctgttaaatatttataaactcttttattcaattcattatccaatgacttagttgttaaataatcataaatacaatcgaatattttttgatattttgaaacatttaattttggttgatcttttttcaattcaggtatttgatctaataaaattttaattgcgaaaactccttcattttgatcaattgcacttttcatcattaaataaattgaatctttattaaataaatattcgtaacgtttaacattttcataaatttctaatttaaatgaccaatctaatttaggatgtttccaaatatttgcaactaaattaaataatgttatcatataaataccttcataatcattttcccaatctacattatctttaaatttcataaaataattacctgcaatttcaatactatcatttgaattaattgaaattaaataattaatcattaatgcaatacttttagaatcaattggaacattaaattcatcttggaaattttttctaaatttttcaataaatttaaaagattttttagaccaaattaatgattcaagtattaaattatatgaatcagtatcagcaaattcataatctttatcaagtgataataatttttcattaaactttttaacaagttcaagtggtgattcattttcattaaggttataagattcatattgaataagagacatccaatcatattcaacatattgagattcatcgattgattttagtatattaattaaattttgagcgtataatgatttttgaaattttaatgaagatgataataatgcatataatatatcattttgaattaatttagaataattatcatttgtgaattgatttgttaattttgctaatttttctaataattgatttgatacatcattataattatttttagttgcaaaatataatatttcaacataagaatcgaaaggatttttaattttcttttgttccataagattaataaattttattaatctttcattaactaaattatcttcaaaactttcactaatttcttcatcagcagctttgaaaaataatgaaattaaattatttgaaattttttcattatttaaattttgtataatttccattaataatataatagttgcagtatcaggtttaatttcattactaaaagcttcaattaaaatttcgacaactttttcattaatattaatattttgatgattttcaatttcttcattaatgaaagcatttataactttaataacattatctctattagtacttaataatatataattaatgaaaatttcaaataattgtaatctaattgattcatcattaagataatcatttgtatttcttaaagcattataaaatcttgggaaaaaatcgatataacgtacatcagttaaagtcattgcaccaagtacactattaagcattaataagatttcatttgaattaaatgaatctaaaggatttggtgtttgatcaataaaattaataactgaattaatgaaaggtaaatttttatgagggaattcaccatttggtaaagaattaattaaatgaataagtaaaactttaagtcttttagcctttattttgggtgacattgaagtatttttaaaagtattttgaagttcgaaatagtattctgttggagtatttgtgtcaattgaaggtaatgttgaataatgtgaaaaattattcatattatgtaaatgtgaagtatttttcaatggatataataacatattgggcagtttagtgaatataccattatgagtgggtattctcctatagaatataccatatgaacgtcttaacatagtgttatttattagagaatatatacaagaagaagtagtaaaagactatataccatacttttataaatttgaaggtctctcacttttaccctcaccaattacttcacccttgtcattatacaacttaacatgtctctgatattctttaatagcccaattaagaccaacaaattgtatatcaggatcagaactacctctactaagggtataacgtttccaaaaattaacatctttaaatcttggatcttcctccctgaatccattttgtaatcttaattgtgcaacttgttctcttaaataatcacaaactcttgatcttaaatctcttgcctctgaaccaaactttaattcatctgataaatcatcattattatccttattaggatatttattacataaatttttccattcatctctaaaagatttaattacattatcatcgattgccttaccaatattaacagttatagttgaaccaatattacttggagttaaataatcagttttcatatcaatctcttctggacgaattttttcaaaaccatcagcaaatattggtacaacgactggagcaattgttggttcaagtactaatcttgcagtcccccatctaaaatatctcattgaattttcatgaggtggttttaattgacaaacaaaaccttcagggaatatatgaacccaacttggtttattacgtagaattggaggtggtaaagtaaatttttgtaaatttaatgaattatctggtgataataatctaatacaggcatcaatacttggttggaaaggacctctaccaaatctttcacaaggtaagattctcccaagggagaaaaaagctgaagagattttatttgtaaagcaaacatttgaagcagctaacccccatctaatatcatcataattaaagaaataacgccaaggtaaacaagcaaataacattggatcatcacaggttgacatatgattagcaattgttaaaatagctcgattattatctttagcatattggaaagcattatctaaatgatttaaaccctttaattcaacattatagaaagctgttaagattaattttgagaaagcagtaacagttgaagcagtaaattgagaagctaatatccaagaaagggaatgacgaggtctagttgataataattcatcttcacccctctgtagtacatcatcaaatgacattatgattgttatgagaggaagtatgaaagaaagaaacttaataaagaaagttaataaagaaagagttgtatatataaagagtgaaaaatatttaattaagaaaagaaaatattacataataattaataaactatacttaactacttacttctttttatttgtaaaacgttcagttacatgttcaattttaatattaataccattagaatcaataaattctcttaaataagattcaacttcatctgcaacatcaccttgaatgacaatttcatccttcttttcactatttttactaattgaacaaccagttgcaaattttgaagcaaattttttacatgttttcttcatatcgaataagttaggatcaagtaaatcaagatttgcaattgcaacaatatatttatgttttgtacgtggtattctcttaattaaaattttactattttgtaaattaattaaatctctctctaatttacgttcttcctttaattgcattttagctaatgaatttgaaattttctcttcctcctctttagagagtgaagatttaatatctgaattatataatttattgtaaatttcattattatttgattgtaaccataatttacattttttaaaagatttaccaaattcacaaaattctactggtaatgaacaaatttcacaatataataccatcgttatgactatatgagtatatgactatatgaaaagaaagaaagaacagtatagtatagtaatagtaatagtaatagtaatagtaatagtataaggttaataataataaattttcattaatagtgagaaaatggaaaaattgtttactattagtattatagagtatatgttcttgtttattattattatagacaatgacaaaatataatacattattaaaggctaaattacaggaattattagaggcaagaggattaccaattgaaggtaccaaggaggttttaattgaaagattggaggaatctgataaagttgcagctgaattagatgaagatgatgatgttaaggaggatattagtgaggctgttactcttgaaaaggaagaacctactgaacctactgaacctactgaacctaaggaagtagttacagaagaacctacagaagtacctaccgaagtacctaccgaagcaacattagaaacaagggtattagaactattaaacactaaacttaagagagcaattaaattcaatgaagaagaagtaattaaacgtctcaatagtgagatattacgtattaataaatttggggtaagtgcagatagtgcaattgtacatgaactcaatggtaccaaacctaagccaaagtatactaataaagtgatgaagagaagaacaccaaaaggattcagaaatagaaataataagagaaatagaagatattaataaagagcggaaatagtatattatagtatttaagtcatttatagtagtaaatccctcattttaaatttttatttataaggagagggtcccttctttttttatttgttttattctttgttctattgtactgcactttcttctctgggacaatgtcaattcactccatttcaactcattcctctatatcctctcattctactctatctagagatgatatagttgataatacttctaataataataataatacttctaatattctcacacctccacttaatgatgatgattttgctcctcaagcttatgaccctgaagatgctcaatctcaattatctggtaacctttcttcaactttatctcgtgctgaatctttgaaaatggttagaactgaaacggctaaatctttgaaaaatttaggtcttaataaagttatttcaattgctgatccaattagaccttctaatattaataatcctatattccctgaagaatatactttagaaacaactactggtttagtcccagtagaaactttacatgaaattggtagatctagatcaaaagctcaaagtggtactacttcctcatttaatcgttttcccactaattataaccaagataatgaagatgatgaagatattcaattggaaaaggaaaaagaacaacagaaaaaccaagatttagatgaagaaagtcaatcttctaaaactaatccaccatttgatccagaaattcaatttgttactttctacattaatgatccagaaaaccctcataattggaaacctttccttcgttggacttatacaattgtcctctctttaatggttgtctgtgtcgctttcggttcttcaattgttaccggtgctttaggtccaatgtctgaaaaatatcatgtatcaactgaagtttcaatcttatcttgttctttaatggttttaggtttcgctgttggccccctcatttggtctccattatctgaacaaattggtagaagaccagtttattttatttcatttggtctatatttcattttcaatataccttgtgctgtggctccaaatattggtactatcttagtttgtagattcctttgtggggtatttgctgcttcaggtttagctaatgttggtggttcaattagtgatatgttcccaactgaaactagaggtaaagcaattgcttattttgctgctgctccttatggtggtcctgttattggtcccttagttggtggatttattactagatataatggtaaaatttcacttatattttgggttaattttgcattttcaggtttaatgtggattattggttctttaattcctgaaacttatgctccagttatcttaaagagaagagctaaaaaattaagaaatgaaactggtaatgaaaaaattatgactgaacaagaagctgcaggtttatcattaaaggaattaattgaaacttgtctttatagacctttaaaatttgcaattactgaacctgttcttgatttaatgtgtttctatgtttgtctaatttattcattactttatgctttcttctttgcttatcctgttgtatttggtgaattatataattttggtgatgatttagttggtttagttttaattccaattataattggtgcaggtttagctttattaacaactccaattattgaatcttattatgttaaaatgtgtcaaactagaaatccaacacctgaagatagattaattggtgcaatgattggttcaccattccctgcaattgcactttggattttaggttcaacttcagagaaacatattttttgggttggtcctgcttcttcaggtttagcatttggttatggtatggttttaatttattattcattaaataattatattattgatacttatgcaaaatatgctgcttctgcattagcaactaaagttttcttaagatctgcaggtggtgcagctttcccacttttcacaatgcaaatgtatcataaattaggtttacgttgggcttcatatttattagcatttattacaactgcaatgattattttaccatttgcattctataaatggggtaaatctttaagaaaaagattttgtaaagaaaatttttctgctttccctgatgatgatgatgaatagttaattcatagttaatttatttattacaattacaaatacaaaatacaaacaaacacagtcaaaataataaattatatctcttgtaacaatatctttttttcattctatttttattctacttttattctacttttattctacttaattttttaataacttttataatattttataataactaatatctaatatttaataatcaaagcaatgaatctcttataaatttattatcttgatcattatcatttaattcactaccataatcaatgattaaaccagatattggacgtttatttacccaaactgaatatttacaaatattccttatatcattgattgtttcaatattaaccttttcacaatattttgtacaatgattaattaaaatatcaatataataacaattacataaagtatctttattattattattattattattattattattacagaagttatttactgaatttagtgaaagttcatgacaattaagatattcttcattgttctacaagatattggttagtattaatgtttatatggttattactatactctacatacacaaataggacccatatgagcaatatccatggtctaaagaaagaaagaaagaactatataacagagagccccaggaatgagaggcattttaaatttaataaagcgatttttaaatttcaatttcctttctatgtaaaattcttgtttttccgttgatgattcaatttttcatatttggtatttacagtggatgactccttcatttattaagaatggataaggataaaagtgttgggaattcaactagtattattcgtaaaagacttaattttactgatgaatcattatggaaacaattttcctccagaagattacaattagttgaatcattatcattaagttgtaaaaaggcaagtgaacaagatgatgaaattaaaatgtgtgcaaatactttattacatgaatttaattttaatgaaaaatatttacctgattttgataaattagttagatttgcaattcaaagtgttagaaggaataagaaaagatctcagaaaagattagcaaataaattaaatattgaaattgataatgataatgataatgatagtggaattgatttagaaaattattataattttaatgatgaagataggatacatgaaaaggaaaaggaaaatatacctattaaaaaagtcaaagttgaaaataatgattttgatgatttaattaataatgataataataataagcaaattgatattgattctaaaattgcactaaataatttaacaagtccaataataccaacagattcagataaattaccatcattgaaaaaattaaatgaaatttcagaatttaatcaatcttcgaaaattattttacattcaattaaaacttctaaaacttgttttgaaatttctaaaaataataataataataatatcgataacaataatttaaaaaattatgaccttttagaagaatttggttcaaattgtataacaactgctgttttatttactttagagaaatggtttgatcatttattacctgattcatcatcatatattaaattaagattaaagagtgatttaactttaagtttaattattaaaaatttagatcaatcatcaattgaagttaattcattaaataattatgttgcatctcaattatttaaaaaattaattggtggttgtgttaaagattttggttttaaccttatacttaatcctttatgtgatatttttcatagtataatattaaaggattatccaattattaaaaaagatgaaaaatggaaaagtaattcaagttcaacaacttcaattaattattttgatgaaaaatcattatcatcttcaactacaaatacaaatataaatataaatacatctaccactactacttcctcatcaaaagatagaaaaactaaacaagaaactcctgattatccattatcaacagctcatatacccattcctccaccttctgataataatattaatttaaattcaatttcaatttataatacaaatacaaatacaaatacaaatacaaaaaatagtagtccaattgatgaaaatgatatacaattaaaacatcaattaccagttttacgttcaaaacaatatattaatataattataaaatttaaagaaaaagaattaaaatttagatattcaaatgatagtaatgcaccaccaacaattttagaattaataatgaattgtaaacaagcatttggaattataaattcaacaaaattattaagtttaaaagatattaaatcaaattcaattattaaaaatgatcatcaattagagaaattacttaatttattatcaattttaaataatgattcaatgaatattgaattaatacttgaattaatttattcaaattcaactcaaggtttcttaaatttaaatcatgataatgaaaatattgttaaaattgataatccaccacctccaaaattaaaatctaatgatttaaattcaaattctaaaaataagaaatcatcagattctttaattagtagatatttacctccacctagaccaattcgttcagatccaactcaaagaggtccattcctaaattttcaacctttgttataaatataatatctttattatgattatgatatgatttactgtgtaattatgtactttttataaatttttgttcttaaaactagttctttaatagatttaatatgaaagatgatgtcgtatttgtgatatgttgacttttctgactaaatgtttgtaatcttaagaatttttttttggggaatttcataaaattaagcaaaacaaaaagttgatctaaataggataaaaactatacagctaaatggagtttttttcaggcattcatttggtctttttttgaggcattttacattattgtagctataataaataaactttttcaattgatgtgaggtcacgtgacaacattacactcccctcagaactaacataacgtaataacacacaacaattatccgatatagtgtaacggctatcacggtccgctttcaccgggcagacccgggttcgactcccggtatcggaacgattcattattttttctttatgttgactttgaaaatataggaaactttctttttttaataaaccaatatttaaaattattttgcatctataacctaataaaacaatacatccatataccaatcatagatagaacataacacaacatagcataataataacatagcataacataataataacataataacatgaaaaaagagctgaatttctaaaattcgcgacttttctcataaattttcatttttatgcccgattgggtaattctaattaaatgtttatttcattattcatgaatgagagagaaagttgagaggagagagaagttgactttgttgaaggacaataattgtagtacatctcattattatattatacactattaattattaattacaattgaattgtaacatctaacatctacaccatgtccaattattcagaatccggacagttcaataacaatgatgatgattcattatcattatcacaacaacaacaacaacaacaatcagatcaacagcttaatgatgttaacaacaatgaacaagaattagatcattcatttataccaacatttgggaaaaatgaatttaatcaactgtcaaatcctgatacaactcaagatgatgatgtttcaatcattgaagcagttgcagcagttgcagctgcaatgaatactgataataatatgatgattaataataataataataataataatcaacaaaatcatcatcaacatcatcaacaactgaataataataacctaaacactcccaatactactaataataatacaaattttaatgaaaatggattaaactttaataattcaaatgaaacttcaatcttatcagagacaacagatccaatggatgaagatgaaaatgaaaatgaaaatcaaaatttgaatcaacatcaacatcaacatcaacatcaacattcacatgaacctgaaaatgatggtcttattattattaataatgaatcaatcaactttaatgatttagagaaacaaactccaatgattgatgaaaataatcatcataataatttaaagagtaaaacaattaaatttactccaaataagacaagtgagaatataagaaaacctcatctatatatcacaaatccaactaataaaaaagctaaaaaggataacacaaagggacctccaaaaaattcaagatttttcagagtttataatttagatggacaaaataaaacttcaaaatcttcctcaattcatcattataatccttatagatatcctcaaaatagaagtaaacttaatcctcatcctgattttattaaaagtaaaagattgaataaaccaaaagttgataaattaggtaatattattaatattgatacaaataaaaatccattttattcaattcaatcagaagttaatgataatggtgtatataatacatcaacctcatcaccaacaaaaccagtcaaggttgataaatatgatccaactgaatctgaaataccaatttttaaaccttcattagaggaatttgaagatatttataattatattaattcaatcaaagatattggtaaaaaatatggtgcaattaaaataataccacctgatgaattcatacctaaattatcaattaatttagaatcgttttggattaaatcatcaagacaatcatggagatcaccagctgatgaattaaatacaagatgtgaattttataatcaattaagggaatatttgaaatcaaattcaaaaattaatttaaataaattaccttgtattgataaacgtgcaattgatttatatagattattttgtgttgttggtttacgtggaggtttccaaacgtgttgtaatgaaaaattatgggcacaaattggtagagaattaggattttatggtaaaattagtagttcattatcttcatcaattaaaagtgtttatcaaaaatatctttcaggttgggaaaaaatttataaagataaacaagaacatgatttccttaatttatcaagaaatgatgaaaaacattcacttttccctaaatcagatactgatttatcacaatctttaaataaattaaatgataaaattagtattataagaaaatcactcaaaaaagaagatccaattacaataataactgaagatcggacattaatcaacaagaatgttaatactgaaggatcctcagaaactacatcagaaacaataacaaattcaacagtggatgaatcaataccaatgattctaggatcatcaagtacatatttgagaaatagaaatacattaacggatttaggattcaccacctattttgatcaatcaacaactcataaaaaaggtataacattaaatacattacaaacattaccaggatacgatttttataattggatagattcaaataaaattgatgatataccaccaactgaacttaaaatatcatcactttatacattaaaacaatttaatgataaaagtagaattttgaaaaatcaagtattaaataaattttatccacaagatcattattattatgaaaatttaaattatttagagaataaatattgggaacttttggaaaattcaaatataatttttgaaactgaagtttcatttaatcaatttactaatattcatgattcatgttctgaaaataaatttttatcagataaatataatgttttaaatgactcaaaacctggtccacttaattttaataattcaacaattactgatggttcaatgttacaatttattaattcagatagtgatacaattttccactcaaaattgaattttgcaatgtttttcggtacaaaatcttggaatattgaagatcattggttatataatatggattatcattatttaggtgatgcaaaatcagtttatgttataccaccagaatttcaaaataaatttgaagaattaattaaagaaaattataataaaattaaaaatgaatcaagaagaactgaaattgcaatgaaattatttgaagataatatatcaaattcagatatttataattcaagtattgaaaatggtgtttcatttgatttaaagataaatagatcaaaaccacatgatataaattttagtaaattgaattattttaatgatgattcaattattaaattcaataacgatttaatgttcacaccaaaatatttgaaaaaacatggtataccagtttatcatacatatcaagaagttggtgaaatgttaattaagtttcctaaatcttattcatcatttttttcagttggtacatcagttacatcatcagttaatattgcaccattagattggttaaatgaatcaatggaaattaataaatggtttcaaaaacaacaaattataccaaatttttcattgtttacaatgcttttaataactgcaagagaatcaaaagatattaaagttttatcaaatattgagccaatattaaatcaattagttgataaagagatagataaaagaaataaattacgtcaatatattagtgaatattcatgtaattctgactataatgttataaataaacttgatgaagttaaattaaaatatgatttaattaatggatttaatgatgagaatgagaatctgaaacttgttgaagttaaaagtgaaattaaagagaataatgatgattttaatgatgtttttgatgtaagtaattataacaatgatgctaataatactaataatgaggttactgataataatattgttataaaatcagaaactattgaagatgatgatacagattatgttgaggaaccagtaaccgatactagtgaaacaattggtagtgaaatgtttacaacattaagtaaatggaataaatttacagattctgatttagttgatattttcccaagttttatacttatcaagagtatgaaaaataaaagaagtacatttacaatgtcattagaattatttattgaaatgaatgaaaaatcattatttaaatctgatgaatttgaatatagtttaataacattagttaatgatgaatatttaaaggaaagtttagaaattttgaaaagtagatttgtcaatatcgagacatggtcaatcagatatcatgaaattattgaaaagaatggtaagccaacaattgaagaaatgagaccaattttagatcttggatattttttatttgattcaaataattttaaaaccgatgcatcaattgaatattatagtaaatatgttgaagaatttaaacaatttgaaaaagaatttaagaaaactgaaaattgggttaaaaaagtcaaaactttctttaatattaaagaatgtaattcaattccattattagaatttgaagattttgttaaattagttgaggaaattcctcaattgatgattacatgtaaagaaatcaatgaagtgatagacattggtgaaaatatgaaagattttgatttcaaggcaaaagatttattaaataaatattccaaagaaaatgatataccaataaatgaattagaattactttataatattggtagtaaactaaatgttaaattagagacatttaaaaaaattgatattttaatcaaacagaaaaaatggacgatgaaattagagaataaaattaattcattaaatgaattaaagcaattatatgaagatggtaagatattagttttaatgaccaaaaatgttaataaaattcaagaatatgagattaatattgaaattttaaaggataagattgagagatgtaataatgtaattgaacaatttaaggaaattgagaaagatgatagacttacaagtattgaagaattaaataaattaaaggatttatgtaaggaattaccaataattgatacattgaaaaatattgaagaattaatttcattaatgaccaaagttgaaagaatggtaccagaaataattgaaatgattgaaaataagaataaatatattgaagatgataatattaaatttgaaattagattagaggaatatttaagagttatgaagaagagtaaagatattttccaagataatgatattgaaactaatttatttaataaaattttgaaaaaatcagagaaatatcatcaatattatgaaataattgataaacaaataattcaatcatcatttcaaaatataagatatgaaactaatgaatttaatagtataattagaattagtgaaaagggatattataatgaatttgataaatttgatgaagttaaaggtattaaatattttattaattataatttagatgttttaaattgtaatgatgatagatattgtgtttgtaaacaaacatatgaaggagatatggttgaatgtgagatatgtaaacaatggtatcattttaattgtattggatatgttaataataataaagagaaggagatagaaaatggaaatgaaaaagagaatgagaatcaagatattcataacaataacaatattaatacaattacaaataataataataataataataataataataataatacaggagatggtaaatttctttgtccattatgtgattttgaatgtaaattagatacaagtaagaaattttatgataatattaataaaagggttacatttgagagtatggttttatatgctaagaagattatgagagatacatgtaaattaaaggcatcaggattagcatttttagcaatggttggagaattttacagattttactattcagttattgaatttggaattgttgaaaaagttgaaaaaattgaagatgaagatggtaatagtgataaattagtgtgtaatagtgataatgttcaacaattacaccaattacttgagagattgaatggatgtctattccgatacgttgaattaggagatgtactacagaagaggtatgtatatcttcaaaagcaacatcaaaagagtgtataaccttacttaataataataataatagtaatactttccccgcattaacataacatgaaaaatttaaaatttaaaatttgacacccccactgatccgtgttattttattttattttatgattattaatatgattattatatgattatctcttttgccatcttcttagtaattagtattattactagtataatatacacaggagatgctcattaatctgtatcttgcaactttaaaacctacacctctctcgagggcgtatattattaatattggggctaatggatatattaataataataagctcagaattaaatcatcatctccacttttattaagatatcattctcataatggccaaccatgtaacggtcattctcatactcatggtaatagtaatgacgataaaaatttagatattccagaaaaaaatattcatcattattatgaatatattccaggtcaagatgttaaaaaagttgtcactgttagaaatggtgaaaaaatatttattaaagatggtgatagtaataatagtgatattagtaacacaaaaccatcaaaacatggtcatgctcattcacatcctgaatttcctgaaatggataatatggatttaaatggtgaagattttacaattaatgttaatccacaaaagaagacattatggactcaaattaaaaaattctttgatcctcattctccattaagtgaattaggtggtacagttaatagtcatactcataatcattctcattcatcagatcctgaagctttaaaactttatgatccaaaaaatttaacaaatgaaggtgttaaaattacttggattggatttggtgttaattgtagtatggcaattactaaatttattggtggattttatttccattctcaagctttaattgccgatgcagttcatgcagttggtgatttaatttcagatattttaactttaacaactgttagatttacaaataaaaaaccagattctttatatcctttcggttatggtaaaattgaaactattggttcattaatggtttcatttattttattatatgcaggtttccaaattggttggagttcattttatgaaattattgctccaattataccaaatgctttacatgatttatttgctttaattccagttcattcacattctcatgttgatttaacaacaattgtaccaaatgatgttaatgaaactggtcatgaaggccatgatcatattcatgaagcaactaaagaagttgcaaatattaatgcagcttggttagcacttgcatcaattggtgttaaagaatggttatttagagcaactcgtaaagttggtgaaagattaaattcaaaagttttaattgcaaatgcttggcatcatagagttgattctttaacatcagttgttgcagttgcaactatttcaacgggttatttccttaacatttactggttagatgcaattggaggtttatttgtttcaattttaattatgaaagttggtatttcaggtgttgttcaatcatttaaagaattaattgataaagcattaccaacttcagatttaagatatacagaaattgaagattcaattaatgttattttaatgaaaaatgatagtcatatcttaattaaggaattaagtattttaccatctggtacaaatttaaatttagttttaaaacttggagtttcatcatttgataaaaattatgaaaataaattaacattagaacaaatgggttcaattggtgaaatacttaaaaaggaattatcaactaatttccataatattaaacatacatctgttcaatttatttcaaatgctgatgaaaagagtaaaatagagaataatgatgatgaaattaaggaaaaatctgtataattaattcactcccttccccaataatatcccattccattccattcatttcagattatttatgatcaactaaagtaacgtatatatatatatatataatgatttagatttattaaatagactatattagatagtaaacaaggtatcctaaagtaaagtaaagtaaagtaaagtaaagtaaaactaccctttctggaagattccagattttccacatagtaaaaaaaaatttcctcgaagtgccggaataagtgataatatttcaccttataaaagagtttcatcccattcactgattctttcaatttattcttaatctttcatttattatcgcaagacaatagaataatatgtcattaagtacttttgacccagaaaatccagataatttagaagatattgaaaaacaatttgctgttaaagcagtacatcatatggctacatattggaatttacttgaatcaattccaccatcaaaacttaaacttacaaagcaagatgatgaaattttagataaattttttgaatcattcccagaatataataataaggaaaaactttcattattaaatgaagatgaattaaagacaaaggaagcaaaggaaagatggagaacatatattaaaaattttgaagaatcagttgcagattttaattttggtacattaattagaaaagatgttacacaagattattctgaagagaattcaatattcgttgttagaattcaattttatgcaatcgaattagcaagaaataaattaggtttaaatgattgggtttatgcaagtaaacattaatataggtttgctaatacttatataatttatcaattaataaatttttctttgtatattacactttaataataaaactaataaataaaatttacaataataataataaggtaaagaaactacaatgaaaactatttaaaaaaagaaaagtataataacaaattcatgtcagtcccgaaagatggttaattcgaacagcatcgccgaagctagtcgataaaacagttgatgtttcttcatcaccctgaattgttattataatagagaataaaagcttgaaatggaataatataatacacccgactgggtagacattattccacttgatgaaaagagaaagcttcagaaagaagataggtgtgtaaactggtaaaatttggaaatgaaagattcaactcaccttttataataaaatttcaaaaaaaaaaaaattcagtgaaaagtcaaattgtagggtttcttctcttacaaggatggcatttttacaaattattacttcttttatttatatcccaataataattttgtatttatcgtaacaatttgtaatttaatgactatacaattgtaaatattattattttaaaagctagaaaagacaaaatttagaaggatataataaaagtaaaatttagagaaagaagattatttaatgataatttataatcaatttatagatagaatattgtaaaatttataatataaataacaaagattatatttttgaaaaaaatgatatttttccattaaacttagatcatcttcttaactaattggttgatgtattcttctctgttaccagtagaaccaccttggacgaaatgttggaactttcttctaacaccccaaccaccagatgggttagataacttgaatggccataaaaagttgtttgcttgtttgaagtttggaccaacagtgtagatttcatgaattaaatcttcaactgattcaataccatattgacctaatgatgcttcaatgatagcattatcagttaatggaattctttgtttgttaaccttaccgtaacctctcttgtaaactaattgtctaatagttgataatgatgggtaaccaatagcacaatattgttcaactaattttaataattcagtagttgccttagtaactctaacgaaaacacctgcattaatttgggttaatcttaataattggaaaacttttcttgactttggtggaattttcataatacccttaattctaacaacaaagacaactttagcttgttcttcaacaaagtatgaaccttcagcctttgctgctctcttagcatcaatgacagctctttctgctgctgcatattcgttaacatatgcttcagttctcttgtaaagagcagctctcttttccttagaaacctataataaaaaaaagtaaaaaaattttatgttagtaaaatgtttttttaaatgattttgaatgtgttcaacatttcaattttttatttagcaaaatttccctttctctatgtttctcagccgaaagatggtgttataacagacagcatcgcattcgctagtcgatataggagacaaagatttcatcataaatgaaacaataaaagaaaaagaaatcatgaaataactttcaattgaaatttgatgaaatggagtataatacttacaatctttcttgcttttcttgctgctgcaacttctttagcgtctctttcaactctctttgctgctttaacttgagattctggtcttggaatactatattgaaaataaaggtaagtaaaatttttatgttagtaatttgttaaaatgtaaattaaaaatagagttagaactctaacttctaatgattaatctatattttctccgagtcaaaacaatattctaagaactgattaattccaatcattcaaagacgagtttgtacacagaggaaatacacttagtctgaaaaccatttattgaaataatattaaaaaatatctgtttttttcatttcaataaatagtgaaaacacatcggggttacccaaatgtatttaaaactatatttcccatggaataattttaatcataacggatgattcaacaataattttgagcacaaaattaaagtaacgatcaatcacataatgacaagtctgctgtaaagcaataaaaatttgcgggatcaaacatatcacaaaataaagataaaaaaatcttcttaaggattatgctatagtagatacccatttgttggagataataacgagtgaataataatatagtaatattaaacaaacatcttgttttaatcccaaaacgtccaaggacataataaaagaatcaatcacatttttatggagctcgattagattcataagctcttgataggaatattaaagaaacaaattaactgagaatttattgaaacaaagtaattcaacaaatgattaacaagacttgattaatgatcatagaagatatattattaagaaatataaacataccctgccattgtgtcttgtattaagttgttgtttaaaagaaataaaccaaaagaggatataaagttaaagtgaaattgccggaatataaataactaataactgaaaaactttatcaatttaaataaatgagaatgctagtgaaaaattagaggaaaattttaaaatttcaatttttgcgcgtccttttcccaaagcagtaataagggttgtgcagggtttcccctatttctaattctcgcttcaccttccctattgggagaggtagcaaatatttatctctttacagcaatattaacatgttttttaggattttaatagcatctatcaaagaattttagaaaaaataatacaaaaaaatacaaaataatataaaatcaaaatagtaaaatagcaaaaaagtgttagttaagtttagactttttcatccgagtctaatgcttcatcaatactaacaacattttcaacatagttgtataatttagcagtttcctttgtaactctttcagtcttgtaatataatttataaccgaaaatcataacaacataaacgaaaacaccaatatatgatgtaatgaattgtttatattggaaagttggaataaatgcattgtaaccattgaagaatgtaataacacaaaggaaaaaaattgtaatatatgctggatatggttgaaaccaaattctaaatggaatatcttctcttggaaccttttggaaaactgtagcatcataataagtaatataagcaattaaaacattaatccatgttaataaaccaaaaactgaaactgcgctagagaaataaccaaaaatagttgctgatgattctttacaattcatatatgctaataaaccaaataatgcagtaaataatgatgcatagtatggattaccatttctatttaattttaagaaaatctttggtgccataccatctctagctaaaccatataatgaacgagatccaaggtaaacatcagaattcgcagcaccaccaacaaagaataaaaggcatgcattaacaaatgatggtaaaactttaattgatgcagtttcaatagcaatgacaaaaggtgcagcagctgcatttgaagcagttcctaaattaggattaaatggtgaaacaactaaaccaataaggaaaacacctaaaatataaacaccacaaactctaacaaagacttgtctggtagcagatgggacaacagtacgtggatctggtgcttcaccaaaaataataccaatacattcacaaccagtatatgcaaagacagattgaataacacatgcccaccaacctaaaaatttacctttattaccatctaataaatattcaacaaatgcttctttatgccagtattggaaaccaacagtttgatgatttggtccaccgccggcggtgataacaatactagtaatgaaacaaatagcaagagttaataatttaacaacagatgtccaaaattcaatttcaccatagacacgaacattaaaccaattagcaaaaataataacaacatagaaaacagtaataaagataccaggatttaaatcttttctccaaaattgaataatcataccaagagcacttaattcagcaggtaaagtaatagcataagtaaagaaataattccaacctgcagcaaaacctaaagccttatcagagaatcttgtacagtaaccagagaacgccttatccataggacagaaagcagcaagttcacccaaggagaataaaacaatcataagaagagaaccagtgaatgtataaccaataaacaatgaagctggaccacctctttttaaagcagtaccagaaccaataatcaaaccagtacctaaagcactggcaaccgccatcatactgacttgtcttgctttgaaatctctcttcaagacttgttcgtcagtactttgaccattttgatcaattaaaattgaacgattagaatccagtggttcaatatcatttaaaccagaagttgattcttcaactttactactaacatcactacccttttcaccttttttgtaaaaactttcaaacattattgatctgattcgaaagtaggttttgaactgttaaatgaacaaataatttaatttaattcaatttaatttaactatggtttatgctatcatacaataatgtggggaattagttatttaaatatgattttggatgaattatcgtacaacaataagttaatcctattttctgatcattataatcaaacttggttaattacaagataagataagataaagataaggtaacgatacaagatatatgatcagaaatcaatgctcatctaaggcattaaagaaggttaagtttacaaaattggcatttatcttgaacaactttgaattggtgacaatcaattggcattgactgaaaactttattaccagaaaaggaaaatttggcattataaacaatcaatgtaccatttacagtttccgcctcatccacctacaatatctacactatctttaatcggattaaaaagcggcattacattcattatacattataacattctcttaacgattgatattatcccacttttaactgtcaaaactatttaatatgcaacccttctttacatgtactttcggcaatgaacctacaaaactcaacgttatctgcactatctactaatcgtaataacaatctactataacagccatctatctcccacaactaacattcttctctataagatctggagatacaccccactttatcaaccgcaaaagcaagaacaaagcggtattagataaccacttgataaccgaccggcaatgccatataaaaattgaaaaaatgtagccaagcgctttacatttccattaaatggttaagtaagcaagcaagattctgcacggcattggttaagtctccgttgaatctctttacgtaaatttatcttctttgttatcagatgatagagtctctacggtaaccaaataaatatattaatcaaggatcagagtctaataatagctaataagataaagcagattggaatccagtttgtttgttatatagaaaaaattaattaattattatatcaaaaaaggcaagtaattactatagttagtattaatctaaatatacacttaaaccttttcttctgattctaatgcatcgtcaatactaataacgttctcaacatagttatacaatctagcagtttttctagttaccctttcagttttgtaatataatttatatccaaaaatcatgataagataaacgaaaataccaatataacaggtaataaattgtttatattggaaatttggaataaatgcattatatccattaaagaatgtaataatacaaaggaaaaaaataccaatgtatgcaggataaggttggaaccaaattctaaatgggatgtcttctctaggaactttttgataaactgttgcattatagaatgtaatgtaagcaattaaaacattaatccatgttaataaaccaaaaactgaaactgcacttgtaaaatatccgaaaatagttgctgatgattctgaacaattcatataagctaataaaccaaataatgcagtaaataatgatgcatagtatggattaccatttctatttaattttaagaaaatctttggagccataccatctcttgcaagaccatacaatgaacgagatccaaggtaaacatcagaattcgcagcaccaccgacaaagaataaaagacaagcattaacgaaagatggtaaaactttaatagatgctgtttcaaatgcaataacgaatggcgatgctgcagcattagatgcactacctaaattaggattcaatggtgagacaactaaaccaatgaggaaaacacccaagacatagacaccacagattctatagaagacttgtcttgttgcagatggaataaccttacgaggatctggagcttcaccaaagataacaccaatacattcacaaccactgtatgcgaaaacagattgaataacacatgcccaccaacctaaaaacttaccagttgaaccagtatgcaagtattctaagaaagcaccctcatgccagtattgaaatccaacagttgtatgatttggtccaccaccagctgtaatgacaatacttgtaataaaacagatagcaagagttattaatttaacaacagatgtccaaaattcaatttcaccgtagacactaacattaaaccaattagcaaacacgataaccacataaaagaccgtgataaaaataccgggatttaaatcttccctccagaattgaatgattaatccaagagcacttaattcagcaggtaaagtaatagcataagtaaagaaataattccaacctgcagcaaaacctaaagctttatcggagaatcttgtacagtaaccagagaatgccttatccataggacaaaaagctgcgatttcacctaatgaaaacaagacaatcataagaagagaacctgtaaaagtgtaaccaataaacaatgaagctggaccacctctttttaaagcagtaccagaaccaataatcaaaccagtacctaaagcactggcaaccgccatcatactgacttgtcttgctttgaaatctctcttcaagacttgttcgtcagtactttgaccattttgatcaattaaaattgaacgattagaatccagtggttcaatatcatttaaaccagaatttaattcttcaactttactactaacatcaccacctttttcatcatcttttttcttatataaactttcaaacatttcgtttttgtttttttgtttagttaaggaagtttatattatatttgtttattcatcaggttgggggagtggaaatgtaaataaacgtcaggtatttaaacaacattttgactttattttttcactaatatctattgttaactgataagatgagatggtggagggagttaatgaaatggaataagaatatgagaacattagataagataagataagataagataagatagaacaaaatactaatagaataataataaaaatgtaatagaataaagtgaaataacaataagataagataagataagcacaaaatacttcaattaatgttataatgccgcctatttgatataatataaatgtttcatttgcttaaagataaaacaatcaagaacccattactcgattctatcccccagttggtatttatagttttcagattgatattgataataatgataacaagaagataatgttaagataatggatatagataagatggtggggggagttatttgacatgtgattacgtaatgatagaatacattttttgaaaatttcaggtactaacactgaacagtggaatttactgccattaacttgtatatatactttcatttggataaacaatatctactatcaccatcaggtatgagtgccgctgctatagttgctaatagaggtgtctttcttaatggtatgttggtttcttatctctttgtatttcaatagaatctttttatactaactttttcattttattttttatttttcattttagatactgaacctgattataatcatgtttccgatcaagaatatgtaacttttagaaagaaagcacaggatgcttataataagagagcagagctttctcaaaaatcacaaaatgcttataaacaaggtgataaacaaaaagcacatgaattatcagttgaagctaataaacaattagcaattgcagaacaatttaatgcaaaggcagctgaatttgtatttattaaaaataataaagattctgatgataatgatattgatttacatggtttatatgtaaaggaagctgaatatattttaaaacaacgtataataagtggtattaataaacatcaaccaacaattgattgtatagttggtaaaggtttacattctaaaaatggtgttgctaaattaaaacctgcagttgaacaattatgtaatgatgcaaatcttcgttgttgggttgataagaaaaattcaggtgttttacatattgatattcaaaatgctcaaattcctcaatcttggtataatattaatccctcaggtattggtgcaatggatgatacatattatgcttatcatcctgatgaaaagccctccaataatcaaccatatcctcaaacctatcaaccatcctatcaacctcatcaacagcaacatcaacagcaacaatatcatcaacaacctcatcaacaacaacaacaacaatatcaccaacagcaacaacaacaacaatcacaaaatacaggttttgccatgtgtctctttggtgtatttggccttcttttcaagtcattctgtcgttgatcttcttctacatatatctatccttttaacactgtaacactatataacactttaatcttactgctttgtatcatatcatattacgtaagcaacatataaaagtttccctaattgagacatgttaaattttaacatgcaatttgatcagccttaatcaataagtgtatcttttgatattgcaatatattaatcattgctaaaaacaactaataatgtccggagaactgaatagactaaactcaacgtttaattccttttttaatgttatccgtatacccaatactggtaatacaactcatgatgaggaaactccaataataaatgaatcaacaaataataataataatatacctgaaatgcccggtgctttcacattccctaatgaagttaataatgatattaataataatcaaaatacaactccaatgtccaactatgtttcaaaattctttgatagattgataacgattttcattgtttcattattcctgattgtattcatcccagtatatgtattttatcgaatagtattatacgttttctttatactactttcaatgcttgttaaattgaatagacatggttataaaaagattaataataaacatcctgcaaatactgcaagaaaatttattatgaaatttgatgaaaggataggaaataaaagtaatgtgtattccaatgataatggtgatatgattagggatgatataaatgctaattcaggcttatcaacattagattcagaaaatgagatacaggaaattggaagacctgattttttagaatgtgcatattctcatgctttatttattgttaaaaaggaaattaaatggctattagtttatattgaaagtgatcagaataatgatgcaatcaattttacaaatgatgttttaactaatgaagaatttttaacatttattaaagatagaaatattttagtttggggtaatgatataagtgaaagtgaagcatatcaaatttgtaatcaatttaaaattacaaaattaccatttttaggattattttgtttaactgttaatcaaacaccaacaacttcaggtatgagagcttcattaccttccttatcattagttatgaaaattcaaggttataaaactttagattatacattaaaaaaatttaatcgtgcattcaataaatataatcctgcattagttcaattaagacaacattatactaatagtgaaggagaattatcatcatcagattcaattcaacgtgcatatagacaatttagacaaaatttaaatacacctccagttataagatcattagagagaaataataatgaaagggctaaattacaatggttaaaatggaggaagagtagattaatacctgaaaataacattgatggagaatttgcaagaattgcaattagatgtgttgatggtacgaggaaacagtataaattagataagcattcatcaattgaggaactttatgctttagttgaatgtactatattaaataatattgaagttgatgaaaatgaacaatatcaggaacctgaaaattattctcataactatacatttgatttaattaatgttctgcctcgtgttgttatacctataagttatcaagaaagtatagaagaaaatgaatatttatatccaagtggtaacttggttatatcaattcgagaatgaagttgataaatcggatatatactatagatgatttataatgtcttttgtaaaattagattagcaatttgaattaggtttgatttaagtttgatttttttaatttatatactactatacatgatgatgtaaataagcaacaattatgccttctttgaagctttcttagccttcttctttgactttggtttcttctttaatccacttaaacccgattttaaaatatttgtatattcattccagaatgaatctaaatttactggttcaacaattgtactcaatttaattttctttgatttatccttattaccatctgttattctaataagtattggatatgatttattagttgatttattttcatggaaaattggttttattttatcatttaaatcactaaatggttctacaccatcaatttcatcatcaagtgaatatgaatatcttttttgtgtaatatatattgatgatttaccatcatttttagttagtaatgatgtaacttgtttgaaaaactgtttaaatgttaaatgttagtaaaattttgaacatattgataagagtataatcaatttttataatacatacctcttgattatctagtatagccattatctaatgtaatctgtgattatttgaacaaagaaacaccacttcctgtaagactgtaatagtcgatcatgacagtgtccaaaaatcatgttctcaacttccacagtgaagattgaaaaaaaatgaaattggtgagaaattcctataggaagattcgaattggtgtattacatttattaaatactaaaactacatactatatgctttatggtaataactatacatatcctttgcatatccgtaaggtaaaccaaagactgaatcaattgcagaaactatatttccactcttaatatctataatatcactatctgatatcttttgtggaattgaaccaaatgcaggtgcaaattcaacagagagtttatcatcatagacttgataatgttgacacatacttagcccacaaagaacataatttgtatgataaaaatcagcactacatccaggtttatcacgtaaaccaaacttatcttgacaacaacatagaatatagttttgtaatttttgacgatcacatattggtataaatgtttttgattttgaattgtaatttataagagtttcaattaatgcacaactaccaccaatccaatgactataacaaccatcaactaatttatttgttcgaccagagaatcccccctctaaattgtattgtctatcaacagtccattttattaaattatcaatatttaaattagattttaatattttatcaggacttgttaaaataaacatagcagctaatgcacaaaatgtataaccaccatgtgcttcatcacctggttcaccagaaaatcctccttcatatgtttgacattctattaaccaatcaaatacacctttagttatatcatcatctaaaatatcaaaaatttgagctatacataatgcacaataaactgctcttgtatctgattcaccacctttatgcataataaatgatccattaggtaattttaattctaataaagaatttttcactttaatagggtcaatttgtgaccatacattttgatctttagttaatgctaatgttaatatagcggcataagatgcagctaaatggaaaatctgatattcaccaccaccaaaaccttgatatttatcattattatcatttatattggtattaagaattttaagtaaaagttttgaagcattttctctttcatttttagataattcagtttccaaaagaatacatgaattcattaaccaataagcaatccatgtcttagatgcatctaatttagaaaacattgcaggaagtggataacctataacaccatgagtaaatgatatatgtgcttttttatttaattttggaaatgaattagaaccttcatttaatatatcttcataaattgtcaatatatcaacttctgtttccattttcttttcgattgtgtctgttaattcttcacctaatggtgcatcacaatttgagaatgaatcataactaccattcagcatttctattaatgtatcaaaatctggtatcttaattgttgaatcagtaatggaattccttattcctgaaaattcgtcaaaagaagagatattaccaataccatttgctccatcagttatttctgataacttacttctcatcttatcatataataatcatttaccttaatcctttatttaaaagtaataaaaccagcaattgaacaggctcaaataggaaacttccaacaataaatcaagcaccatgacttaccgacatgcgaggtgttaattaaaataaaattgttaaaatgtccgaaaaaaggcgacttttctcattttgacatgaattttaacaattttaacaattttcaccaattttcatgtttcactgattggtaacatgtatttattgttattatattggttttctattggtagtatttagagatactagagtaatatatagacaatgttcagtacactgaataaacaaccgtttggtcaaccacaaccacaaacacaacaacaacaaacacagcaacaaccatttttgagtagtaatacattaacatcacagccattccagcaacaacaacaacagttacaacaacaaactcaatcaggatcattgttcataaatacatcaaatattcaagttgttgaagagtcaagatttgctaaatatcaactgaatgattcatcaaataatcaaaatggtcaatctgctacaagttcaggaacttcaattaatgaatcatcttcatcaaaacataaaattccttcacgtttaatcaaaagaacaaataaagttaataataaaaatgaagatgataaaccttcaattccaatattaccatttaaacaatcaactcatgtacaagaggatacatttaatgaagattttggttatttgtataaatatgataaaccaccaacaaaatcattatttgatccttcaaatttaaatgatgaaacaactacaagtgaaattttaatgggtgattcagttttcaaaaatatgacagagaatccgcttaattttcaaaatgttttcaaaagacctgaaaataaatttaaacctgaaattgattcaattactcaattaaataatattaaccttccatggtcaaatgatggtaattattatgaagataataaagatgaaaatataaattctttcaaacctcaaatatctcaaaataaatcatcatatagaaattctccttcaccttcgtttataatgaaagaaaaattatattattcaattatagtatatggatttgatgatagtaatttcccattacttgttgaacatttctcaaaatttggtaaaataatggaagatttaactatatctgatggtaattatcattatggatcattaggtaatttagttgcacatgataaattagttgatccaaatgataataaaattaatgatgaagataataatacaaaaaatacatcaaaatcttcaagaaatttaaaacaatcgtttaataatcataatactaattctaataataacaaaaatttaaataaaaataattcaaattttttcccaatttttatgggtcaaggctgggttaaattaacttatgataatacaaattctgcaattagagcattagcggaaaatttaactaatgatggcacaggtaatattttaggtgttataccttattcaaaagaagatttagaaattttaataaatgataaaattagtaatgatttagatattggtaatggattacaaggtttaagtaatgatttggatattaatacagttattgcagataatgaaattggtagatacttattatcacaacgtaaatcaaaattaagtagtgaatcatcacaatcaagtaattttaataataataataataatggtagtagtaaacaatcaaacggtacaggtaatataagaaatggttcaaacttaatactgcgtaatcaaaaggaaaaagatgccaaatcaatttggaataaaggtatgggttttatgtttggtactggtgaaatttaattaataatttaaaatatgatattaactcgttccattttagttttaattttaattatataagaaaaaagcggtgaatgtaatattttgtataaatatatacgttgtcattaagtaaattaatcgataagttagttaatcaatgtttaattttttttctaattcttcattcttcattattgaataatgatccaagacctccttgttctaatccatcaacattatttttctttctacctcttgatgcaccttcaatcattttattacgttgttcaagatatgaatcacctgatccattactcatcgcattggcaaataatgtcagtaaacaattctttctctctcttgatctttgacaattaataaatagattttcaaaatttgttatagtttcagtattaacttgtaatttttgctttaataatataagtggataatcagatttaaatctttcacccgcatataaaattgataatgtatatgcagtctctgaatgtgcatctgaataaaatttatcaagtaaaacatcaattaaaattggcataatattttcatttataatcttatcaatttgatcattatttaatgcaatcaattcttgagataaatgtcttaaaattaatactgcattaaacgaacatcttgtatctctaaatgcaattatatcacaaactaattttaaatatggtattaaaacttcaaatttagtaagcataaactctctggcctgcttttgtctatcagataatgaacttcttggtttttgacctgctatatcaatcaataatctagcagccatctgtgttaattgtcttaacatatgctcttctaacatttcttcgcttaattcttgatcagattctgtaacatcatatctaagacctctttcataaataattttccatctttcatttaatacttcatcaagtgtattgaaaacttttggtaaaaaccgagttaagaaagaatcataataacttactgggcaatttttgaaaacaggtctaacaacttgattaatcatatgtctccaagaatgaagtgtaataccaacagattcatctgttaatgctttccatactaaatctgcattcttcgtatctatatataatgtatcttcaagttctgaaattgtactaatcattaaatatgcatattctctagtgtatctgattatatgaccaagagaatctgcaaaatctcttaatgtattcattgcttggtaattttcatctaaaaatgattctcttgattgaattgaaataccttgttgccaaaatctttccattgtagtatatttgacaaatgtttgaacttctgctggtaaacctacccaatttgcaggattgtgatatgcttgaatttgataaattaattgataaataaatggtaaaattggtttaactcttggttgccataatgctaataaacttttataagtatcagatccatgatctaatttttcaatactatattgaatcagaattctagttgaacggattggaaatgccgttgaccattgttctttaagttcctttttaagttcacgtccacgatcatccatatcagcttgtagtagattagtaattgccgtaatatttcttgatctaaaatattcagcaattttaactatacctaatctttccataaaccaatgtaaatctgataatccttttaaagttattggattttgccatgccattaactcaggatcaataattttactaaaagtttcttccttattacctaatgaagatctttgggatacaactaataaaaatgatttgaatgcaactatttcatgtgatattaattgattttggcttaaaatattttgaatgacaacttctaattccccataaatatttttcaaagattcaggcatcaaatatgctaatctatttaactccgttccacttgatgctcttaaatctctaatattttcataatcttcatcatctggattttctggatatgggaatatacaactatcaatgactctttctaaaactttaaacattgtcgagttcacatcttttaataaaggagtaaattgaactaaagtttgaatttgttttcttactaagacgggatttttaatttgtaacataatcaataattgacataaattatcagcttgttcagttaaataagttttaatctcattcatatcatcctcggtataccaaattaaccatctcgttatacctctaacacatgcttcaataattgtaaattgagaataggcaaagatataaggttctgaatgtttacctttaaaaattaattttggaatagataaactttgttcaccaagtggagatgaaaaaaaattattaagtctatcagctaaccaaaccaatgaatcttttggcattttacaaacaatgattctaacaacatcatcatttagttttctaaattcacttaaaaatgaatgtttatcggaatcattatcaaactcatgggataagtatttcaatggagttgattcggggtctaaatcattatagttgactaatttatttgaagctatttctaatagttctagatcaattgattgaaaatcaggcatgtcacttaaatcatcatttcttaacattatcccccaaaattgaagagaaattgaactaatgtataatgcttcatgtttagtggtttctagtactaatttataaaaattggttaagtctctgtttttagttttaattgaatttttacttgtaatgtattctgataatatcataataaattctactgtttttttcaataatatataatcatcatcgtctatatcatcgggatctaaattgatgtatttgaaagtttcaaataacaattcataggatttatcattaaatattgaattaactaaccattcattatcttcaacattggaatatggtttattatataaactatcaaaacattcaatagttaataatttaatttttctatcatttatagtaagtaattggaacaactttgtaattatatcaacttctcttagcgcagctggcaggatccaaaataatgaaattttgaaaatgtctaatattttgataataagatcggtatagaattcctttttatcttctgtactactttgttctgtgttcatattattatcaagaatattattgttattgtttctattgttgttattggtattattattattattattattattattcaaaagataagtcattgcttcatctagcaattgacaccattttatcaaccaaccttcatttgatgatacaaacaatctaacagtatcatttggctcaaatttggaagataacactctttctgagacgacaatttcaggacaaagtgagatcaaaacagttcttctctttgaaacaattggatcatcaactaaataaatatcttcaaataaagttttcattattaccagtgataaatctctagttatttgactatggttccataattctaataaatttgaatccattaacatccaagaatccaatttttcctcttctgtaaactgtactagttcattattattattatttggagagttggaatttggtgttgatatattattttcaatattatcaatatctatagtagttgtgttattattattattatgattactattatttggatgacgttgcttcaataaacattcaccccaacatcttttagcgatttctacccaaagaaatgcaattttagatcttatataatgaggatcattagttgaaattttagttgcaagttcaacaatccaatttcttacagctaattgtttttcagtatcccaaataaaataataatttgtaattgaatataataataaattaagtgcataatgtcttacaatattattataattattatcacttatagctaattgataaccccaaaaggggcaatcaggtaaagatttaattgattctaaaaaatcctgagcctcatgacgttgatcattatttgatgcaggattatagatagtgtctaatgagactataatttgattgattccctctactgacattttaataatgtgtgaaacggtttaggtgatatcagatagtatatcctaggataatcaatgttcaattgtgtataataaaatccgaaagagtatatacaatcaaaggaatgaatgcataaacatgggtggcaattcctcatcaaaaaaatgcaaatcgtaacatttactcagtgagggaaatttcattttttttttacgttttcaatatttattttaattatgacgagtgatacattgaagtttagttagatagtaagctggactctgttggtacaatgattagggtaggagtatcatctgtttatagagctaatgtgaaggctttatgtggaaatagatttggaaatggaaatgtaaatagaaatagaataacgccccttgcattatttccattgagaaattatgcagcttatcctcctaaaccaccaaaatttaatttcaaatcaaagaaagaattgacacctgaagaaactaaagaacttgaagatgaacgtaaatataatgaagcagtcaatagtggtatatggattaagaagtggggtgcaattgttggttctaatgcatttaataaaaaagcaactaaatattatattttactttatgttatattcttatgttatggtatttattatttccgtaaattatttgcaagacatttagaagaagaagatttaaaaaaattacgtgatgaaggaaaagttcaattaactgaatatcaacagttgagaattagagatttatctaatgatttattaagaaccaaagattcacataaattaaaggcatattataaattgaaggaagaatatgataataaaagtgatgaagagaaggcaaaaattggttcatttaatccaaaacctgaagatgttaaagatattgttgatttaaaatatgaggaatgtattttaccaccaaaagatttaagctcattttatgataaattagctgatgaatatgatagtgatgttggtacagaagaaatgatgtcatttatgaaaagtaagagaaaatgggttatgaaacatgttaaaggtgatgttttagaggttgcatcaggtacaggtagaaatatcgattatattgatccaacagttattaatagtttaacatttttagatgcatcaaagaagatgatggatatttgttatgataaatttcatgataaatggccatcatttaagaaagttaaatttgttgttggtaaggccgaggagttagttgaattatcaaataatggtaataataaaggtaagaaaacttttaaatatgatacaattattgaaacatttggattatgttcacatgaagatccagttaaggcattagaaaatatgagagaattacttaaacctggaggtagaattattttacttgaacatggacgtggtgaatatgattttattaatgaaattttagataagagagcacataaacatagtgataaatggggatgtcgatggaatttagatattggagaattagttgatgcatcaggattagaaattactgaagagaagagagcacatttaggtactacatggatgttagtttgtaaaagacctgaggatgcacctgaaattgatgaaatttcatttgttgaaaaataccttttcccaaagagaaccaatattgattcatccaatccagttattaagaactagtgtaaatgatatgtaactacaactacaactataactatatataatctaacttactgtacataatgaatgatatataaataataaaataccggttataatagagtacttttatagtctatagccgattaaaacgcgggaatttaaaagaaaaattcaaatttatttaaatacctgcactcttccattatatagtagccatcatctttatatgggatatatacctgagaacatacttgacaatgacaactagacgtgctaagaaggtgtcttttaataagagctctaaaattgtagagattgatcaagaggaagatcttaataaccttgatttagagattgaaaatcaaaattcatctagatttaataatgataagaataatgaatctaataaatctaataatgatgattttgatgatgattttgatcccgatacaatggatattgatctaacgacggggaaaaagagaagaggtagagccgctgctagagctgatgccgctgcaggtactgctgaaactgatgataaagctccagttgaggcacttgcaacttcattaggtttaatcccttatcatttaccattacttttatattcaattttatctgatggtacaattatgaatgatacagcaaaggcaattcaaaaaactttttttaatttaattgcaattgcattaatttattcagttttagttggtgaaatggctaaattacaaagaaatccaaataaaaaatcaagtggtccaacaggagctgaatttttatatacttcaatttcattcccaatttcagttgctttatcaattccaatttatcttacttttctgttatttggtgctccagctggtcctttaaatactttaacattctatttagctgctcatgtttcattaatttcttttttcccattattaaatgtttacaaatttactgataaaaatgcaaagcaagtctggtggaaattacttactttccaagtaccaaattggaaattaaatcaaatttattgctcatcacttggtggtttaattggttgttggttaggtgttattccaattccacttgattgggatagagattggcaagattggccaatcactcttttgattggttcctatgctggtgcttttgtaggttcagttgctagttatttatatggactttacgttttatctaaattcaagaaaaatacttgatccacagacataatattcaccacatactgtcatatactatactatactatatttaatttacatatactttcctatttactttaatgtaattaccaaaagctatactaattatacagaatttaccatgtcttcaacagtgacgcgtaataatactctttaaaattttgaatgattttcaaatttcatgtattaatcatttactttcttttactgacaacacacttactaaggcaatgtcaaggagaagagcaagagaagagtcaggtgaagcagactatggaacagactcatcatctgaggcaactttaagatctgaaaaaagagctagaagttcaggtgtagcctcagctcaaatttcaacggcttcaacattatatactgataatgcctctgatacatctaaaaaacttgctattgctacatgtagagttattctaggattttctaatatgaataaaatattgaaaaagtctaatattaccaaaatcattgaagaagagaatgaaaaaggttcaaatgttcaatttaagaaacatattatgcctgttttatctaatatattgactgatgttttcaattatgatattgttgagttaccttctaaaaaaactatgcaatcagtctctattgtgaaagaaaatgctaatggggactcaagtaaagtagtgaagtcaaataatccaccatctgatgaatttgttttagttaataatttaccaccatgtttacgtgcattaaattattctttcctagcagattatacaaaacctatgaataaatcacttaagggaatggaatcaaataaagttggaaatccaaatatatccatatacggtgaaaatttaccaagaccaacaactaatattattcaagatggtatcaaacttttaataataagtattgttttacttcataacaacaatattttacaaagtgatttgataacaatattaaagactaattttgggtttaattttaaagaaaaagaatccgttccaatatttggtaaccaaaccttgggagatttccttacaatgttaagtaaacaagagtaccttgaaagaacattgataacagtttctaattcaggtaaaggtgcaacacagagaaatatcaattctaaaaatgctagacatgaagataatactctaatgattaaattaggtagaaaatgtgttgctgaatggagttctgcacaatttgtacatttattacgtcaaattatgcaagataaatgggatcctcaattacaagagaatgcgatatatactgttgaatctgtatggaaagagtatgatgctatgatgcattcataatcatactttatgtctattacctatataataaatatccttctgtatactaataaattaacctacttcactttaagcaacaaccccctcccctctcccccacaaaaatgactttttcttccattttccctgcattgataaaatcagttgcgtatatacactttgaatttggattgcttctttttcttttcaaagttacatacttctattttacatgcccgatactacctcttcagtgggggttttcggatactctcaatcaatgactgataataatgacaattctaatgacaatttattaattactgacgttaatgattcacttttaaatcaacaacatggtaagaaaaatgccaaacgattggcacttctattttcatctattgcagctttagcttcaggtaccccttatttatatggtgtatattctcctcaattgatcagtaggtgtggattttcagcattagattcgtcttatctttcatttgcaggtaatataggctcatcaattggtggatttttcgcaggtttaatcattgataagtttggtgttcgtgttggtctattattaggtgcaattttacaatttactgggttttttcttttctatatcagttataaatatgcattacacaattttgttcaattattattctcaatggtttgtattggattaggttcagttttagcatattttgcaacaattaaagttgcaacttttaattttccaaaacatagaggggttgccaatgctttcccggtaagttcatttggattggctgctttattctatgcatttgtttcaacagtttggtttgttggtaatactgaaggtttacttaaatttattgccttgttttcaggtatattgattacattttctagttttttcatcgaaatttatgaaaataatgaagatgatgaaaatgatcatggaactcataatgattttgaagatgaatcatctgatgaaaatgaatttgaattaagcatgaagtatttaatgaaaggtcatcgtggttcatttgctcaagttaataatatactacggaatgattcatcaagttcattattctcggatatctccgaagtttcatcattattaaccaactcatctacatcaatttctagagaaccatcattgcacagtgtagcttcattaaatccaatatcaatcaatagtcaacaacaaatgttgagatataataataatatttcttcatctccattagatttcaaagtaaaacaatcagttccaagatctgcatcttttagaattgcaagctcttttagtagctcaccaagaaactcacgattatttggtagtgctactcaaaaatcaataaaaatgccatcaactgaagaatcacctttagtaacgacatcaaatgatgctattgctacaactcctaccgctccctcatatccttcatcattgaaaactttagcaagttcaactaatttacatttttctaatcacaacaaaacaccatcaaatgattttaaaaatatgatcataagtgaacaatcgaataatatccctacaggtttaacttctgattcattaaatcaagttaatccaaatacagcaaacaataacagtttcactgataattctgaagcttttactaaaagtttacaaactgttcctaaaaggaagtctagaaagaaaaagaaacttacaacaaaagaacatatatctcaacttttctataacaaattatttacgtcacattatattttgaatgctttctattgtgcaattggacaagtttatatttatggtattggtttcattgttcgtgctcaagttaattattacagaacacataaacctgaatcaatattcctcaaatttgccatttatttatcaaattcgtctgattcagcccaaatggcagttgcatatcaagcattacaagttagtataatatcattttccaactttttgggaagattaatctctggtccagcatctgacttggttcataaaaaactcaaacttagtaaaatttatgttgttataatttcattaataattttattctgtggtcaaatgtctttaattttttgcaataaacttgactttttatcattaacatcatttttaattggattatcatatggttcaatatatggtactatgccatcaattgttgcagattcatttggatctacacattttgcaactacttgggcattattgggtacgggaccaattacagtatttttaattttgagtgattattttggaactgtctatgattcacggagtaaatggtttgatttagacgataagaaagttaaaatgtgttttgaaggtagaaattgttacaaagatgtgtttaaacttaattcgatgatttgtggagttttatttttaggttatatttggttagtaattgtttctcaaaagagagaaagacattaaaatgtataaattttataaattttataaataataatatatccaaggacatttaaataagttaaaagacatataccaatctattagaaaaaaaagcattttgagaaaagtacccatttttcggatttttaatttttttcatagcaaaaactctctcgcatctcgctttgtattatggagagaggtagagagtagtatttcaccaacttgtaacattggaatgaatacaattgctgaatataagtgttgactatttaactagtttttatagacagtattcaatacacaatccttccattcttgctggaaaatggacgtgtataatcagtttctgaatcctaccacttctcttttcagtctttactgtcatttcactggagaaaatgatgataatttaattgtttccaagggaaatttacttcaaatatttaaaattattgatgttaataacattgaatcaactgaaaaatcaattaaattaaatgatactcaaaacaataaaatcaattcagaaaatggtaatacaatactagatacattaactaatgaagatttagcagttgctgaaaaaatcaatatgccagaatacgaaattgaaaaggatccactatataagcttattctagtatctgaatattcattaaatggtaaaattattgatgtacatacttttaggccatctaatttaaatgatatatatggtgaaactgataatttagataataagagagctaaaattccatgtaaagttgattttctaatagtatcaactgaatttgcaaaattatcaattgttaaatggaatccttcagataatttagtcagtgttgttagtttacattattatgaatccttattggactcattatcaatggaaaaattgaaaacttcagatgttattcatagaactgatcctaattttggttgtactttactacatgttaatgatttacttgttttcttaccatttaaaaaaaatactgacgatgatgatgatgattacgctgatgataatgatgattataatccattatcaaatttgaaagatactcctcaaatagttttatctgattctaaaattagtaatgatttttttcttgaaagttttataattaattcgaaaactttacatccaaatcttaagaatattgtggatattcaatttttaaactcatatagaaatccaactgttgctattttatatgctcctgatactttatcctggactgggtttttacctcaagtaaaggataatatgacagtaatcgtattatctctagatcttgaaaaaaagactgctgatgttattatagaaataaataatttgccatatgatgttgaaagaattgtacctcttgataaacctataaatggatttttgttgatgggatcaaatgaaattattcatgttaattcattgggttcaccaaagggtaagtatgttaatgaatttttcactaaaactagttcattcaatctaaaagataatagtgatttgaatttgcttttagaattatctgaaataagtcaaataagtgatgatgaagctttgttaattaccaagggtggtgttttttatactcttatatttgatgaaattggtggtgtttcaagtttgagtaaaattaccaaaaatccagaatcttcttattctgatattaaaatatgtgatgttttacatattagaaatattccacaaaaaaatatgatatttgtttgctcacaaagtggtgatgcaatgttacttaactgggatttccaatcaaaatcaaaattagatacgtcatctaaggcagatatagcaaatgatattttcgatgaagatgaagacttttggctatatgaaggtagtaacaatgagaatgatgaagcaagtagctcattgattaactctaaatttatcatatctgataaattaataaacatcgggcctttgtccgatattactttaggttattcatcacttgatattaaacttcatggtttacctaacccaaatttcaaagaaaaggttatttatggctcatctggacttgaggaaactgcatgcatatctgaaattataccatccgttaaaccttcaataaaatcatcattaaaattttcaaatgctacaaaaatttggacaatagcagaccataaaaacgaaactaaatacctcatcactactgatcacaagaaatcaaaaacagagatatttgatgttcaaaatgattataaaactataagaagtaaaaattttatcaataaatcttttacaattcaattcggtgttataacggaaggtgaaaaggttaggcccgtacaagttgtatcatataaaatcatggtatttaatatggcttttaatcatttaactgcaatgagttttgacaaagaaattaatcattgtattatacaggaaaatcatatagttttgttaatgaaaaatggtgagattgaaatccttgaatatgattgtaaaacagagactttgaacaaaatggatttaccggcacttttaaattatcaaatttttaccaatgcatgggtatctaaatcatctttattaaaccatgcaactcctataaagaaaaggacttcagatggtgatgttgctaaagttgtgcagaatagtgaagaacaaatattattttggttagttactgccgataatcgtctattagtattcaaaaaaaaccatttggaaaaagttttcgaatttaaaaatatacacaaaatgtctgaatatttacaattatctagtatggatccaaattatgaagctgatgttgatcctattttgaaacaatgtatttacactaaaattggtgatgagtatgatgcaaagaattatttaatattgcttacatttggtggtgagataataatttacgaatcattttttgatccaactcaacaatgttttaaattaattaaatcaaatgatcttttccaactaccaatatcgggggcacctggaaactcatattcttatgctactaaaattgaacgtaacttgttcaaaataaataatttagatggtaaacaagttgtgatggtcactggtgctatgccgtttattatatacaaacaatataattcagttcctagaatgttcaagtttacttccaaaccacttttgtattttgcaccatttacaaatagtgcatgtaccaatggtttgattactattgatgataaaatatcatgtagaatggttcagttagacttgacttatgattattcaaacaagctacctatatcaaaacattgtattggtgaaacaatcaacaaaatctcatatcatgaagctactaatacttttgttatatctacattaaaaaaagaaaaatatcagttattggatgctgaaggtgaagatactattgaatacaacaaagaactaaaaaatccagctcttaactacagaggtagtataaagctaatatcacctgaacattggaaacctatagatacaatggaacttgaagtcaatgaagtttgtacaacattgaatgttatgaatttgaaaaataatggaactgatagtgaaagagtgataatattcgttggtacaggtgtatatcaaaatgaagatgttccgacttttggaacgtggaaattattggatcttattagtgttgttcctgaaccaggtcatccagaagcaaaatacaagatgaaatcattgactagtgaaacttcaaagggtccaattttagatgcttgtagtgttgacggtagattctctcttgtacaaggacaaagactgatggtgagaatgattaaaaatgaaggtaatgctattccagttgcattcacggatacttctttatattcagtcaatgtgaaatcatttgaaaacttgatggtgattggagactcctatcatggtgtttcattgtatggatttgatgctgaaccatatagaatgatatctttgggtaaagatgaacatgaaatgaagttgagagaatgtgactttattgtacacaatcaaaacctatacattttagcagctgatgataatggtattcttcatatgctgcaatatgatccatatgatacatcatctttaaaaggtcacaaattgatcagaaaatctgcatttagatcaaactcacatacaacaagaatgcttaatgtcagtagaagggcttcatttttttcaatggtttcgactttacctattagaagtgatgttgatttaggatttgaagttattggaagtaatattgacggttcgttattcaaagtatctccgatcaacgaatatcaatatcgtagactttattcattacagaactacattgctgataaagaacaccattggttaggattgaatccaagaatgaatgcaactggtaatttagaagatgagttaagtgtgatcaagagaccttttattgaatataaacttctgtccaaattcacatcaatgaacgaagataaaaagaaattgtttgcaatgagacttggtaaagatgcattggtggatatttatagagatatgatttctcttcagtagatacactataattttgtaaaactatttagacatcagattaatgtaattttagataacgtatatatggtacacatgtaaagaaaaggttcaatcctctgaaagagaaaaatagatttcaatccttagatctgcaattttccttttcctttggatcgacaatgttggataccattaatcctcaagaatggaattatataggctcaggatccgcaaacgtggtgctggggtatattgggaacaatgaggacttaaagggaatggtagtgagactaagattaagtaaatcccacattagtaccaaagagatctatgactatttaaattcggcacagttcaatgaactaaagagatacattcctaaaatgacaatccataaagttggaagtcatggcattttatcctttcagtcaattttagatgatattggaatgaagctttccatcaaacctacagatgaatacgtgttattaatgagaaatatatttcagttccctatacaagattatcaacgaattgaattaaacaaatactataagttttttttccacaaaacaaacaaagagatagtgtttgaactgaaaccgaagtggctctataacctccctgaagcttataaaacgtgtcgtaattgtattatagctcaatcaaagggacaatcatttatcatttgtcatttaaagctgttgggaaatgaaaatactttatctcaatggtgtgaagaaattaataacgagttgaaaaaaagaggattacagttggacttgaaagaaaagttacagggaagtttactggagaatcatgatctttttaaaataattgcatcgattcaaaatagaattaacattcatgagagattggaatcactaaattctgagactgatgtcaatgatgagctttgttttgcgatgacaataagagatttgtctatacttattaaactaaacacaggtgaaacttacatagttgatctggataagaagtcctctaagaaatggagatcgtggaaagaacaagaattgaaaattaaggatcaatatttaaaagatttagattttaattgtagattcgaaacaaacacttgaatcttccttcaagatccatactctaaatttacctgatgacatctttttaacattaatttttattgtatcattaacaaaagttgggcttgttattttgtatttaaatgatgtgattggggtcgttgggttatgatttcgccaaaactgcaatgctagagaaataagtagtggtgcctctatgactacttttggatagttctcgatattttttgcatattctgggttgtaatgtatttgatgggagttgaaagttattgcactcattctaaaactggatacaattgatggtttgcaagatgtactttcatcggggactgtttcatcaattattggttcttctagtaatttcttgaaaacattatttaggtaacatagtaaacgatgctctatgatagagtttcctttgtcgttatcaaaagatcttttataatcagcaagtatcatttcatttctagtgagtattttaactttgtcaacagtttctgtaaaatttataggttctccaaactttaaaggattactgttattaaacagaaatgacccgcttacccacattcttctctgaaagtactcgttacaatcgagcacaggtgcatgataattgtcataaccatcagtacttagttcgtattcatttgataatggattacaatatgctaaagaatagcctattggcactttatctcccaatttaaagatatcattaatgttttttccagttgaattcactagaagtgactccatgaatggtggacaatctttgtccaacaacgattgagttgtaatgtaaagctgttttgcgggaaatgttgatacgatatcgtctttaattacccattttgaattaaaaaggcgctgttttatcttctcaatttgtggctttgaagggtggttgtttgatttgataaatttagagaaaacccttttacgtatcattactgaagaagaaagttgggttttttgaagtttgatccaaaaaaattcatgtttacactgattttttttttgaccctccgagatttgattattaggggaacttcacgagtttacagtttaacggttgtaaggtaaggttgttaattttggagttggaatctataaaagtatctatgatagttttaacaataaaaggggcattaaaaggtttctatttaacaatagagtatagtcataaaattaagcaattaaatttttaatttctgaatcagttaaaatcttgtcgttaatatgaacagagttagttaaaaagacagtcttaggaccttttaattcaataaatgtacctgttttatcttgaggtaatatattttctttaatgaaagttaagatttgattgaaagtagttgaaagagttgaaattgcatctagtactggtttaacatttggattttcaagtaatctttgaggaatctgtatgtattttttaatccaattgaatctcatcaagaatggagggatacttatacctaaattgacgacactttcaatttcactttctaaagatggaacggattcgcttttagagttagatgtataggcaacaattgttttagtgttaacttgaattgattcgttttcagtaagatcaacttgtataatttgacctggtgtagaaattatgaaagtgccatctcccttcatcaaaaggctttgacctgctttagaaattgtagaaggtttaattgaaggtcctgaccatgcaaataatgaacttcttctaacaacccaattggcctttgtattatctaaaattgcaaaatttgagttttgtgcattattcgccattaaaaatgacattggttccttttcattaaaacatctttgaaaaattaaattaggttcctttaatctagcaagttcagtgtacattgaagtaatatgaccattcatagctactattttttgttgtgaatttgaatagcgtatatttaagatagaagatttcggaagttttatattaagtaagttagatgatgatcctaaaacttgatatgtaattggttcaacaaatgcaccgtttcctgtagccattggcaatgaagtgagtggtttctctaattttgttccaggtgttgaagctgtcaatgtgaacaaagatttaatagagctaaaggaaatatttcttgtctgtattatgttcatccttgggtataatgtacaattgtttcacctggtagtccttcaattgttgaataattaggataaaaaggcaacaatttcaattgtacttattgcagcatcaactacttttatctcagcgaaaaatctttctactgatttgctttttctgttgaagagagattccttttatttatcacatcaaatatctctattgggattgaaattaaaaactgaattcatcaatgagaaatacatggtaacaatttaaagatataattgaaactattgaaacctttggccttttgtctagtcatcgatataactactatattacaaatggttaaaaaaattacttaaagtaaagcacataaaaacaaaaaatcaatgcgagctatgtggatcgaacacatggcctccagatcttcagtctggcgctctcccactgagctaagcccgctttgttgtgattgtaagggaataaatacaagttgttcaataatatccacgtgaagattaggtaagctgattacgtaaagatgataagatggaaataggaattccgagatacggaggttcggagatgtcggagtaagaaaggaatgacttagattgaaattgaattaattatgataaggagtggtatgattgataaggaatagtttaattaactatattaaggaatggttaatattgtaatataaataagtatgatatcctgtataactttgtataactctcttctgagaggggacattaatcagagtattagttagagaacaatctactaattaataccaaccgtctcattgctactcgctgtctattacacaaataaaaggtccaacgagtaaacttattttatacttattacttccattacgtaattaagtattatccactatcttacatattttagtttacatttggtagcaccggctagtgtttgtgttcctaattaaatcaaattatattcatctattaattaaattaaatcaactaaaaatgtcatctgctaaagataagattaatgctttaaagcaacaaattaaggaaataaaattaactgaaaagaagaagaagaaagaattgtcaaagaaacattctatcaaacattcaaagaacgttattaaaaagaagaaacatattaaaccacctcttagaattatccattccgatcctgaaatgtctgattattcatttgatgatgctttttcctcagataattcccattctgataactccaattctgattctgatatttctgattccgatactgatactgatgatgataataaaacttctaaaaatgataaacttagttctaactttccaaaatttgatggttcttctactgatgataaaggcaaggaattctccactactgaagctcaacttaaagcaaaaacttggttatctaagttgcacgttaatttaattgataaaggtatttcaaaatcaagctgggctagaaaagctattgttaatctcgaaggtagagcatacaaatgggtagaacataaattagagaagaatccaaagtatttaaagatttcctgggaaagatttttacgtgatttcaaaaaagaattttgtcctgttattgaagatgatatgcatgctatggattacaagattctaacttttaaaatggttccaggaatgaaagtctctacatattctgatcaatttaaagaatatattcaagaattggattttgaagaatctactaaatttcaaatttcaagatatttacttggtttaacacctgaattgaaaaagatggtatcccaacaaaaacctcgtaccttgaatgctgctattcattatgcagaagattctgaagctattttgaatgatattgaagaagcaaaaccaaaaaatccttggatcaataatatcgaacatcaaactcctgttagacgctcttattctcgcccatatagagttaataaatataaacctggttatcataataagcaaagatttttcagaaacaaaagaccatttaaaaggtacaattcaaattttaccccaatcggtggtaatcgttccatgcatttttctcgtcctactaaactaaataataaactatctaataataataatactagttctttttcttatattgcacctccagtaagtattcaacccgaagttgatcatttaaatgtcgagaaggaagaaggtgatactgttgttaataattctcaaagggtgattccaagagatgagactattaagaagggtgattcctctgaagttaaattgttaaagggtgattccaaacaagaaacaaatagtccaactttaaacattccttcattacctgaaattttacatgttaatgctttgaatattgaaaatttacgaaaaatagatgtacaaattgataataaaaattccgcatcagcaattattgatactggatccaatacagatgctattactacaattttatgtgatgaactgttattatcaagcaagattagattatatgttgaaccaattagtgctattttagttaatgatactgttgatgctattggtgaactagatatagatattgatgttgatctatttaataatcctatcaaagaaaaaagaacatttttagttttgcaggcaaacaccaagaaattaattttaggacttccatttttcaaacaacattatgataagttagatatacatgattttattggagatagttttgcaacaccaagtgttaatgttaatttaattgaatatcatgatagacatatttctactattattaataataaagataatgattcatatctaatatatattaattcaatgaatgttgaatcctctgaagaaaatgatattaaaactattgataaagaaattaataatgttgaagttaataaatacagaaatgatattttagaaaaatttaatgatgttgttactatgaaagaaccaaatgaacttcctcctaaaagaaatcacgaacataaaattattttagttgaatctaataagcaagttaatagaaatcaatatcctttaagttattcagaaaaggaagaattaaccaaaactgttgataagttaatacaacaaaaatttattagaattagtgatagtccttataatagccctgttttatttgttaagaaaaaagatggaaccatgaggatgtgcattgattatagattgttgaataataacactgttaaagatagatttcctttacctcatatagaagaaattatttccaagtttgaatctgctgttgtttattccaaattagatttaatgtcaggttattatcaagtaagaatccaagaagaagatattccaaaaactgcttttagtactgattatggtcattatgaatgggttgttatgccttttggtcttactaatgctccagcaacttttcaacgtatgatgaatactatcttatccaaatatttgaatacatgtgtgcaagtttatttagatgatatttttatttattccaaatcttataagcaacattatgaagatattaaaagtgttttatctacattaagagaacatcatttaattgctaagaaatcaaagtgtgccttcttttacgatgaattaagatttttaggtcatgttattactaaaaatggaattaaaactgatccagataaaattgaaaaggttaaaaattggccaattccaactactgtcaaagaagctcaaatgtttataggtttaacttcatattatagacgttttatcaagaatcattctaagattgctgtaccaattcataaatttattaccaaagaatcaaaatgggaagatgaacaaactaatgcttttaatcaacttaaagacgctttaattaacagtcctattctagtacatccaaaatggaataatgattgtacttatgttgttcatactgatgcttgtggtagtgctttaggttatactttagaacaattagatgaaaatggtaaaacaagaggtacaattgcttatggttctaagaaattaataggagctcaattaaattatggtatttatgatagagaatttatggcagttgtagaagctttaaaaaattggagatattatttattaggtagacattttgttattgttactgatcataaaagtttaatttatctacgctatcaaaatttgattgattcaactagggttgcaagatggcttgattatttatcacaatatgattttgaaattcaatatgttgcaggtaaagataattctgccgcagatgctttaagtcgttatccatatgaaaaattgtctgttaaagatgctttagaagttaatcatattaaatttttaggtaattcaaatagaaattcaaataataatattcaaattaataatactgaagttactgttactacttttcctatgaatgatgaattaaagaatttaattattaaaggttataaaaaagataatgtacttgctgatgtttattcaactttgaaaaataaatctgaaattcctattcatttaaaccaccatattaaacattatcaacttaaaaatgatttactttattataaaacattattagaacaagattgcaatagattagttattcctcgttataatagtttacctcaaagatttattaaaaatgctcataataatcctacttctggtcattttggtccttggaaaacttatcaaactttaatggattcattattttggtttaatatgatgcctacaattaaaaggtattgcaatagatgcattgtttgtcaacaaaataacacttctactcagaaaactcaaggattatttcaaccattacctgttcctgaaggtagatggactgatgttacaatggattttgttactggtttgccaacaactacttcaaatcatgatatgattatggttattactgatagattttcaaaaatgtcacattttattccaactgtgaaaactttaactgctgaaggttgtgctaaattatttttagattattttcttaaacatcatggatttccaaaaagattaactagtgataaagatattaggtttatgaataaattttggtatactattcattttttctttggtgtttctttattgttttcaactactaatcatccacaaactgatggtcaaactgaaagagttaataaagttttaaatcaattattaagaaaacattgttcaaatgatcatttacactgggatgaatttttaccaatgtgtgaatttgcttataatagtacttaccatgattcaattaaatgttctccttttgaattagctataggatataaaccagattctatgaaaagtgttaatagttggaatttagatgataatagatatagtccaaatgctcaagaatatgctagacgtatgagattaactttaactcaagctcaagataatattgtacaagctcaaagattgaatgaaaaatatcataatagatcacatagatttcataattataaagttggtgattatattttattgcatcgtgatgcttttggtgcttttgctaaatattataaaattcaacctgcttattatggtccatttagattggtgaaaaaaattaatgataatgcttttgaagttgatttacctaagattaataaaaaggatagagtattaaatattaaaaattttcgtccatatgttcctccagtcgatttattatgtcgtccacctagaactaatgctgaaattttatcaagaattaatcaaatgtgtggtattgctggttttgatgaagaaaagaatacttttgatgtttattggagagattgtgatcctttacttgctacaactattactgctgatcaatttaatacggcttcggaatcacttcgtcatagtttatttcataatgccaagatgatttgtgctcatgagcaaattgtttaagtatttgatttaatttaattttaacatcagggacgatgtttcccaacagccggggtaatgtaagggaataaatacaagttgttcaataatatccacgtgaagattaggtaagctgattacgtaaagatgataagatggaaataggaattccgagatacggaggttcggagatgtcggagtaagaaaggaatgacttagattgaaattgaattaattatgataaggagtggtatgattgataaggaatagtttaattaactatattaaggaatggttaatattgtaatataaataagtatgatatcctgtataactttgtataactctcttctgagaggggacattaatcagagtattagttagagaacaatctactaattaataccaaccgtctcattgctactcgctgtctattacacaaataaaaggtccaacgagtaaacttattttatacttattacttccattacgtaattaagtattatccactatcttacatattttagtttacagtgataataagaccctatgctttctcagtagtcgctttacttatcacgtgattttcaatttatttgaaaataatgttttaaaatcacaattttataaatgcaatgtgtaatttacttaaaatattgttatgctaaaagaatgaattaagaataaactctcttgatagtaaaattacccaaaaatttttacttcttctttggtatgacataaattaattgttttgaaccaaaaaaataaattttttttgccctaatatttttatatgaaaataagacccagcttagtttattatgaactctggatagtaaattaagtttttaaattgtttgattacgtaagcaataaaagcaactcttaaaaaacttacctgctttttaaaattgtaaatgaacggatgcttgttatttcttatattttaattattacacatttgtgaattgttattaatgattaagaatgattacgaattacttatttgggaaataagattattaattactatatttggaatactcgaataactaatattaaatatagaaatcatgttagaaagattataatagttttggaatagattcgagaaagttctattatccgcgagagagaaggttatgagaaatataaatattggaatactttcccaacatcaacatttaataatactatttagagatacttctaaaagacaccagttcatccagttagatactgagttacaagtttacatataatccttatttatattacatagaaaagtagagagttacatttaattagattacatttatttatatttatttatatttattttaataagaactggactataacttaattaatactttattcaagtttaagaaaggatcggtcgttgttaactattacattccaattataaattaaagatccaacgacgaacctcgaccgttcactttcaaaaataagaagccgttctagtatagtggtaagtacgcatcgttgtggccgatgagacccaggttcgattcctgggagcggcacaggtttattttttatttttaaaaattgaagttgtattatttttccataactattttttttatgtttatgcttgtcgattaaaaacaggtaaataacaatataaaaaagaagatatacacgtgaagtttaaatatttaaagatttatttatacaaaacttaatttaagagtttagtaactttaccaattgcgatagtttgtccttgatctcttaatgtaaatctacctaattgttgataatcttcataagtttcaagacaaacaggttcactagtttctaaaattgcaatgattttcataccttgtttagcaaaagctggagctttcttagattttctattagtacctttttctaatttatgtaataattgaacgaaattaacttcttcaatagcagtatgaacatgcataacacatgaaaaacctgatgataaaatagatttaagttcaacaattgcaacttgagcttcaaatctagtaacggtatgaactggatgagagattgatgataaaacgtaaccagttgaaacatcttcttcttcaacattctttaatcttaatctgacttgttcaccacagaaagcagattcagcctcagcttcagtttcattatatatagttaaaacttcaacagaaactttatttggcatcattattaaacttgaaccttttttaatatgacctgattcaattttaccttcaataacggtacctaaatctttcattttaccagaaattggtaacatgaatggatcattaatttttctttgtgataatggcatattatctaaatattctaataatgaaggaccagtataccatggacaatctttctttggaactctatcctttaaacctgcacctgtgaaacctgagactggcataaagacgacatcttcctttgcataaccaacacctcttaagaaaagagataacttacttatacattcattatatctttcttctgaccaaccgacagttggatcatccatcttattaatgacaacaactaatttattaacaccttgtgttttagctaaaattgcatgttctcttgattgaccacctctttcgaatcccgcttcatactcaccctttcttgctgagataactaagacaccaatatcagcttgagatgcaccaccgatcatttcagagacatataatttatgacctggagcatctaaaatagtataacgtcttttgtcggtttcaaaatatgatttaccaacttcaatagttttaccatcatttctttcttctttattagtatccataatccaagataaataccaaccttgtctacctgcatcttttgcttctctttcatatttttcaacagtacgtttatcaactgcaccagttaagaataaaatattaccacccatagttgatttacctgcatcaacatgtcccataaaaataattgaaacatgatctttaccaccaaacatatcactaacaactgatggatcaattatatcttcttgttctgcaataaccgattgtgatttagaaattggagctgaagaaactggtgtagattctttagttgatggtttagattctgactttttagcttcaacttttggagtttcttccttaactgcttccttaacttcttcttttggtgcttcatcctttgaagtttcttccttagtttcttccttagtttcttctttagtttcttctttagtttcttccttcttcttaacagccaatttaacagtactggattttaagtttaattttaaaaccttcttttttggagcagcattaaccttttcttgttgttgcttttgaaattcatcaaagtttaagttttgagcaactggttcttcttgtgcttgattattgtagttattgttataattgttgttataattgttgttataattgttgttataattgttgttataattgttgttataattgttgttataattgttattgttatagttgttattattatagttgttgttataattatttctgttgttgtaattgttattataaccacctcttctgttattgttattattataattgttattatagttattattataattgttattgtattgttgttgttgttgttgatttggatcaaattgaggaacaaattgttggaaattcatatttggaacaaaagtgttagcagcatttggatcaaatgcaggtgcgtttaaattaacattttgaacaccttgagctaattgattaggatcaaatttattagcttgactatctggttgttgattaggatcagacattacttgtaaaaggtatagtatcaagatatatcaaggcaaaacttaaagttcaagatatgttcacaatagtatttaaaatttatttgttacactagattttgaatttccatgttgaaaaagtgaaatttgaaaaattttttttactactattttgcatagacgcatcgaccgcaaagctttaaaatccaccgacccatcgaccacgtaagttttacctctgtttcaaattgatttccaagaaggggaaaaccaaaacacatgaaattaatttgtttaataaaggaatccttgaataataatattttaagattgattccagatagatcagatttatttgtacttcacatactcttcttctgaaattgtgtgctttagttttaaccccttttttctttaaactgtaacaactaaattatggatccggaaacttatttaagtcagaattttgacccttcaaagctaacagtgcctaatcttagatcaatattggtagagcatgaagtttatttcgcatcaaatgcaaataaacaacaattagttcaaatattcaatgataccatcaaaccaagagctaaaactttattgaaaaaatatacaaaaggtttcgttaatccaatatcagataattcatttgatgaaaaagtgatacctgctaaacgtcaacttgaaccatctgtacatgtaccatccagttcatcatcatcattatcatcatctaatacagtcaaacctaaaaaggctataaagaaaataagaaagaataaaaatacttcattatccgatgattcaagtaattctttcctttcaatcgaaaaattcgaaattaatgaaaatgataatatattccttggttcaatagatgataaatccatacatattttaccacaaactaaatttgccgactcaaatagacaaagatctaaaacgccaactaaaaaaattcttgaaaattttgataattcaatcccatcaagtaaaaaattcaatgtggaaaatggtggcaatattattgatagtaaaaatgatagggaaattgaaatttcatttgataataataaagaaaatattaataatacaatcaatgaaaataaatttaaaactaacctatttgataataaaaatgatgatattgtcttaatagatgatatatacgaacaaaaaaatattacttcaactccgacagtagataagcttcaaggtccaacaaatattattaataatgaagctattaatgttgtatctgaaaataacgatggaaacaataaagaagttgatattgatgaatttgaatttggtgacgataaacttgatgatacagtagttaaaacttttgatgttaaatcattaacttcattagaggaagattatgaagatataagttttagcgataaatcaagagatgatgaaattgtttacgaaaaaattcttgataaaaatgatgataaagatgttaagcctgtaattgatattgttgaagcaattgaaactgagatacctaatgaaattatcattgaatcagaaaatcttaatgaaacttcaattgaaatacctaatacaaaacctaaaagatcattctttaaaagattttttctcaccacttttagtattttacttttaacaggttcaggttctatatactcattaagaaaactcgattctgaaacaggattttgtggtataaaatctgaacaaccagttgttaaatttaatctctggtcaaaactaccagaatcaatcaccaacaacttagacacaatgaaaccatatattggtgattttgaaaaatttgctattgataaacttgcaattggatgcaaaccatgtcctttgaatgctaaatgtgaatctgattcttataaatgtaattattcatatgttaaaaattatggaattgaatcattatatggattattaccattaagaggtaattgtgtttttgataccttaagagaacaaaaattatattatttatcacaatatactttaaaatatctgcatgaaaataatgcaaaaaagatatcattagaggaacttcatgattatctgctaatgactaaggaaacccaaataagtgatgaagaatttgaaaattattggaaatcatttgttgaatatgaattgaaaatgaattctgattttgaatttaatgtaaatacaaatgagattaccattagtcatataataccaaccgagtattcaactagaagttttgtcaatgaacaaaataaaagacataaaaccaataagttattttcacaacatccaccaactgatgatttgaaaaaacatttgacaataaatatctaatttgcttttctagtgtagtttgtttctattttgttttatttttatataatgattttatagctttaataaattttagtgtattaaaaaataataaatagaattacaaaaggggaggtggggaacatttttgaaggttatatagtaatctaagagataatatcggacacagcagtggttacaggttcagtaatttgttcggaaataggttcagaaacaatttcagaaacaggttcggaggttggttcagagatgggtgcaataggttcagcagtagattcaaaaactggttcagatgtgatattgtctaaagtgatattttctgaagtaatattttctgaagtgatattttctgaagtgatattttctgaagttatattttgaatggattcatttcctaaatcaataacttcaacaggtgcttcaataatttgtaaatcatcatttccattattaattctatttttcaaacgttcttctcttgattgtaaaatattactgttaccattatttcttgattctcttaatttttgtctcttctcagctctttgttgtgcggcttgttgtttaataatttcaaattctttcaatctttcctcttcttctaattttctctttctttctttttcttctaatcttgatgaacgttttctattagccattaacatttgcatttcaatatctctcttacgttgagcattctgttttctcttctttaaatcatgttgaataacaaaatcaacattagcttcaagaattttacttaaagtatattcatttgaagaagttttcttaccaaatgaggatttaagagttttaataagattatcatattgataaagaccagctgttaaacactcccaatgtatcatttcaggattcaattgatttaaatcattataaggatctttgaatttagaatcaaaatcagttttctttgaaggtatttcaattttcttaaattcccattttctaaggtaaactcttgcatcttgtaagataagatattcatactttaaatttttttcattatattggaatactggtgtaattcttaaatcaatatggggatgttcaaatttatcaacagttttcctaaaattagcatggctcttagtatttgatagcttaattaatgtgtatataacttcaattttttgctctaaggttaatgtagagtatgttagtataggagtgtcatcatcgtcatcattatcatcgtcatcaccattagaattagcattaaaattatccttcttaacgtcttcaactcctttaggaagaatcaattcgtaatctttatagatttgatcaacaaagaaatcaaattctgaatcaattgtaactaatttttgatttttcaaatgttggattagtttgattttcaaattatttatgaaagaaggaggagcaatacccaacaattcctcttccaaattttcaacatcgaaggcatcacttagtttaatgatatgcttaagtaaataaatccattgaactatataggaatatttatagttatttctaagagcagttagtctagcagcatatactggattctcaatcagaagtagcttaggagtcttcaaatactgagccttgacctcttcaggtacaatcttagagagagatacggcgggatgttcagacattgtctatattgtgcaaaggaaccttctagaaattatcgatggatataaaaatggggaatattaacatttaaacaccttaaaaaaacatgtaaataaacacgacaaaatcagtgtcataaacttgcgttacgtaatacgatctgaaactcgttaaatccgtaaaaaagcctaaaattaaattattaaccatcatgagaacttatagcttatttcctttttttccctttccttcttttcaaattgtatacatacatctctttcttttcctgtttttatatccctattactctaattatccatcaaatgcccgttataaagagatccctaactgatataacagatgatggtcatcatgaaatgaatttaccagtttcaaataaccctcataatgatttattccaatttatttccatcccaaatgtttcacaagaatcacttcaaaagactgaatctgttgatatggatatgaacccatctcattcttttaattctaataatttaaataatttatcaagtatgattaataataacaataacaataacaacaattcatctaataacataacaaatcatgcatctatttataactcttatgcaaatcctaattcttttgcaaatcctcacttaaccaattatttatatgatgataatagttataataatatttataccaataataatgatgataatatggataatgggtttaataatcaatgtttaaacacatcagaatttactatgaatcaacaaaataatcaaatattcccatcagatttccaattttctaataatagcaacactactactaataataataacaacattaatgaaggtatacctgatgatgatattttaatggttcctcaagataatttctatatttatgatcatcaagatcctcaatttgtacctgaaatgatgcaattggaattatcaaataaatcattccctcaatcaaatgaactaaatattttcaaaggtaatgatgttttatatgaattttccgatgatgatgatgaagatgatgatttagatttacaaaataaacttgatgatgatgatgaagaagaagatgaagatgatgacgacgatgatttcgaagatgatgatttatataacctcaatcaagataatagtccatctggtgcatctattttctctgctaataacaataatataactcctaccaatgataactatgtcaataatagcaacatcaataataacaatttcaacacgattaatatgagacctgaaacaatgatgtcaaataatgattcatttaacgaaaactccatttattcattaactgttccaaaccaactaaattcaaattcaacagacgtgtatcataattttccttctcctttttcaaattataataacatgaatgagaccagtttatattccagtgatgagaatgatatcccttctataagtatgaatgcattcagtaatgctattattgctcaaggtgacgaagacgacgatgaagaggacgatgatgatgatgatggcgaggacgatgatgaagatgatgaaaacgatgataatgattttgcaattgataacgattctgactcagaattaaataccccaagctcaaatgatcgtagatcttcagttaccgcagatacaacaccaataatcaaaaaggaaagatcttcatctttacgtccaactacaagacctaaaagattaagaagaaaatctcatatatctaatacccttcataacactacaccattaagaaaaccaagaaattcaacatctaattcagttaataatgatttttcaatcaatgatttagatgatcaagcagaggaacatgtttgtaatataccaaatcctaaaactggtaaaccatgtttgaaaaaattttcaagaccttatgatttagttagacatcaaaatacaattcatgcatcaaaaagatcattttatagatgtatgttctgtgaagatgatttaagacgaaaacatggtttagagagtgttaatgaaattgtcgtttcatgtaaatatagaaattctaatttttcaactgaaaattcacattctcatagttcaagctctcataatatcaaaaaagttaaatctggtgctctcgataattctggttacttaagtaataaaactttcagtcgttgcgatgcattaacaagacatctcagattcaggcatggtttaaacaatactcaagtcaatgatgcaatgaattttgccaaaaaaaatatagagttttatgataattaattaagtaatttacttgataattattttaattcgcaaatcttcaatactacaaaaaaataagtatcctccaatatcatatccatactattttacttttctaaatttttaattctatcctaatctcctcttttgaaacctttactttttttataatacaatttttttcataaatttttataataaactaactatcaatcttaaaaaaattttaacctttatttcttttaaataaaatacataacgaatatataatgttttgactataaaacagtttacctaatatggataattatttggctcactttcaacagtgtaaccttgagcttcttgaatttttgtttgctcctctaaatatggtagcaaaacatctttgaatttttcataccctctgtaagttttaacatcgtcatcccaacttaaaataccatctaataatcttttaggaatatatggttcttgacacattttggtcatcggtaagaaataagttctaatagtgaaaataatacaaccagttagtggtagtcttctaacactttgtctttctgaacgataataaacgttattaatatcgactgcagcgtcagcagtattccaaccaacttctttaatatcttctggaccaatcgatgaagaccaagcaacatcattatcagtttgaataaaataattgtttctaacaactggtttatcacaagttaatcttgaaaaaaatttctccattggtctcttcaatttttcatcatatttaggaacatcaccagtagtatgaattgcacttaaaggtaaattaattttatctcttaatctccaaaatcctgcaagcataattgcaccacctttaaggatatattgcccattttcgtcttctttcataattgcaatatcatcttgtaacattaatgctgccatttccattggatcttttttgaattcagattttggtatatcaataaattcaaaaacttcaccagtaactatattgttaatacccttttcagttttaacaaataattttggatatctagttggtaaaaaatttcttaattcaattaaagcttcaattgctgcatcccaaacttcatcttgtgtaccaattaattcatgtccacgttccttaattctttctaatttacgattatgatacttcatccactcattatctaactcaatccatgaagtccagtccatcgatcttatacccatggtaacaaaataagcatgcttgaaagctctatatggtaatggaacagtgtccttgattgaccaatttgcatattcttcaactggcggatactcaaacagttcttccttccatgtacccagttttctatttttattatcagcttccttaatactgactggtttaaactctcttgtaaatgatctattgtatattatcttacctttatatttttcaccctttgttccaattaaatgtaagcaatatgcaactatagaaataaatataattccaattaagatttgtggtgatgtgatggaaaaagttccatcacctactattgttggcatcatcattgtttagttaaataacaaatcaaaatagaaagatgatatttgttggattcagatatattggattatgattttattataaatagtattttaccttagagatggttatggtggatagcagaaaaatttcttatcagctgtacaaatttgcctaatccggtaattttaaccagcgataataaccaaaaatttactaatgaaggaattgaacccatccaccagtcaataatattagcttacaaaatacaaaatcatgtcattataataactgattcaatccttagaaaattgcgctcacactgctttaaatgtacagtagtctggttaatttaccgttttggggtattatatgaataaaaatatttcaagttggatgtttctctcgtaccatctttaaacatgcaattatactggaatgctaaccacttgtatatcttttctaggataagtttaccgccaaagtaactctctagatactttgagcatcccactgtagctatgcaataatcgaaacaccttaatgtacgttttgtcttaaattggcgaagctaaactatagttttcaggaaatattgtgagtcaacgtgagtttatgtactacgtggaaaaatcattctaatgttgctagtagaactttagtagaatgtttttttggttatttaaaaggtgtagaaattctagtaaaaaatattttatgcttacctataaatgagctacaaactctttgaaaactgaacagatgaaacatttcaagttgctgcacggtaatgagtgactattataggtggtttttcgcgtttttaaaaattaaatgttagtttttttttgtattggcttctatttttttgataatttagaaactaaggctactttaaaaaatcaaaaaacaaaaatgttaatcttttttaaaaattttaagtacttttaattgctaatttagcttaaaatattaacttaggcaacttgaaaagtttttaatttaatttctctactaatatatgttaaagtaaaaaagctaagtgacaataaaattaatcacgtgaaaagataacaaggaggctaaaatgagcttttgacacaacacataagactggatggccaagttggttaaggcgtgcgactgttaatcgcaagatcgtgagttcaatcctcactctggtcgattattttttaatcaatttttttgttatagcttgattgcttgatttctaaagtcttttttataactacaatctaaatagtatagctgcaatagaatcaaagatttttaattatcgttctgacagtcatgagaaggtcaatagtttttatcttgttaaaaaaaaggaacatttcaaattgtatgatttgaaaaattattcaggaggctcagcaaaaaatgtatttttctctttcttagtttaattgattccattctttagctagcatcttttaacaggatataattaaacaagataaatattagaaaaaaggaatttccaattataaatatcaaaattactgtaaatggtcaaacaatagatttattattttcaacgaatcgtcgactttatgtagatcagaaaagaatgaaatattggatacagcaaattttaatattagcataaatgatggcaatgggtaataaacgagattttttttataaaaagtttgcatttaaagatgaaaggttgttcaacacataactgttgataattttattacaaaactttcaagttgaaattataaaaaagttcattaaagaattagcccacattctgccaaaacacattttaaagaaaagagatgaaataagaagatatttaatttccgaatacgaacaagaaataccgattcacttgagaatgatcattgaattttattgctgaatgaaatatatatattttttaatccattttctatagtaaaacaagaagaaattttagaatataatgtaaatgtcgtgaatgtggtatatcatacataattaaaaacgttaaacagataaagttgtaacagtgccatcagcgttaccaatgtaagccttttgagccatattaacaaataacccagtttcaacaacccctaccattgcttttatttttgaatttaaatctttaacatcagcaactgggatttcaccaaaatcacaatcaatgataaaattaccattatcagtgatgacaggacctgcctttgcaggagtaccaggtctaacagttggattaccaccaattttagataattcatttaaaattttattataagcatttggtacaacttcaattggaacaccttttttccaacctttacccaatacacccgtacttttacgatcatcagcaacaattataaaattatcagcggaatcagcaactaatttttcttgtaataaacaagcaccaccacctttaatacaatttaaatcagaatcaatttcatcagcaccatcgaatgcaatatcaattttggaaaattcttccaaattacctaaattaagtttattatctataattaattgttttgattggaaaccagttggaatgcaagtaaattgatctttatttggtaagtgtccaatacgttcagcaatataaacaacggtcgaacctgaaccaataccaattattttatgatttggttttaagttttcatcaacagcagcatatgcacaaaatttttttgatttttcaactaaagatgtcattttacggttgatattcagagaaaatatgtgcgatttaaagcatttcattaatagaaataactatcaatcaatatatgagtcaatccatatatcaaagattcaaatgaaaaatattcataaattaaactttttttttaaaaagatggggtgtctctccgataaaaccattgccaaaaaacacgcacgtgacgcacacaagggcttaattacagaaaattaaattcccagaagatttctgcacgaacccttattaccgcaatgggaaaaccaattgaaagacccgcgcaccacacaatgagtgggaaaaactataatttttcaatttcctaatagtggaaaatggaaaaaattgtaaattttctacagtgggggacctactgcggatagtggatattactgttttggaaatattttcagtattattcaatattattacatctaatttcataaattttacgttaatattttcagaaatatttacattagattttattacttttaacgtctaataacaccaaccatgtctgctgcatccaaggtcttaaatgctcaaccaactgaattagaattacaagttgcacaagctttcattgatttagaagcttcatctgacttaaaggctgaattaagagctcttcaattcaagtctgttaaggagatcgaagttgcgggtaacaagaaggctttagtcattcttgtcccagttccattattatctgcttaccacaaggtccaaatcagattaaccagagaattagaaaagaaattcccagaccaacacgttgttttccttgcagaaagaagaattttaccaaaaccagcaagagtttcaagattaggtcaaaagagaccaagatcaagaactttaactgcagttcatgaaaagatcttagatgatttagttttcccaactgaaattgttggtaagagagttagatacttagttggtggtaacaaaattgcaaaggttttattagattcaaaggactctactaacattgattacaaattagaaactttccaatcaatctaccaaaagttaaccggtaaacaagttgttttcgaaatcccatcccaaactttataaatttgtttataagaacatacacccatcaaaataaattttaatttagttaataatagtaataattataataatataatatacattggatagcttatcatatattttatctatcatcacattgactgttttgtgactttaatatatattttactattgatgttgtagtttttcattataatagtagcattgtgatatttcaacatgtaaatttttttcatcttacgtaataaaaaaatgttgctatactatagactttgatttaaacacttttgataatccagtcaaaaactccaattgagtatccttatatagaaaaagcagatataatgttgaattactatagtaaaccaatacttcgacattctgctgaatactatacgaggttagaacttcaaagattcaatgataatttgagaagatattattcagaatcaaattctcctgactcattcggtagattcaatagatcagatgtttataaaaccacacacacacatcatgagaaaggtacatttgattttccgttcaaaccaattccagcttcttataaaccttccataattcattttttaaacaatattaagagaaaatattcattgattgaaaataatgaaactaccgatgattttatcaattatttaaaatgtgcaattaataataataatccagagaattcatcatgttatgatttctactttacattgcaaagcataacaccattattaagtgatagtttgctgaaaattgataataatgaaaaatttattgatttgttcagatttttatcctcagctggtataagatttgaatcagatgatgttatagaaaagtttttggaaatttataaaaaatctgatcaacaattacaactagcattaataagatgtaacaataatatcagtccggaagaattaaggttttccgataaattaacaaatgatgaaatattaaatttaactcactcatattcttctaaattattgaaaaatataattactgaaatattaataccgttacactccaatgaaaaaatacttgaatatttgaatgttttatcattacacagtaagaaaacttgcaaagatcattcattattcaatcatatgatttatttaacacagctcaatcgaatatcagatttagaatttaaaggaaggttttcaatacttttcatacttaatgctataagcaattatattaaatccggagaatatatacctgtatcattgaagaattctttccatgaatatattttaagatgtcaattacaagaagttgatattgaaactatgcttagttatatagaatttttctatcctagtgatctaagaacattaataccaaaattgaatgattttgaattaaaactcatacctgataatttaagttcagaagtttcttcttacaaaattgaaagtatttcaaataaattacctttgagtattgcatcactattatttgatcagttaattaaacaaaatgacatgccatcaattagagatttattttgtgatttgaataatcttgattctagtattgaatacaataaaaaattattagaaacttttaagtcatctgctttcaaatatgcggtaaatgttgaacatgagcataaagaagttcaagaaactctattcgaaattattggactgaatgatgcatattttgtaccgaaatttgataaatttgatctctcaagtgttattaatacccataactctgatgtaattgaaattaataaattttttaacacttatagaacaaaaattaaagattatcaaatgattacagaggaagatgtttcaaaattatttgaaatagttcaaccatcttcaatttatcatgagatgttaatgagatccttattatcgtgtaatttcacatttgaaaatacagaatttatcaaaaattggatggatgaggatccaagtagatgtgattttgttttaacaggtggtaatgatgacttaaaaactaaggatatattctttaaatatcatgtaactaaagtttcaatacttaaaggattactattatttaaacccaatgaaattttccaaatgatccacaaacatggtgataacataacttacaaaaatgaattactgtctgtattatcaacattcagggattatggaatggattatcttattgcacaattagtatcacaggagttagaatctcacacaacaataggtttctttgaatttttaaaagatttttttaggcaaaataacttattaattgaactgattagtgatgatgataaattaaagatttataatgtctatattaaaaaagttatgggtattcactttacaaacggtgttattttagctgcttcattaataccagcatatcaaaagatatttttagcactcacaggtttgcatgattccttcatagttgattgtggtgagtttgcttctaaaagtgataagcttgatttacctatagatatcattaaaagttatgttgaatttttcagtgattttaggtcaatgaaaggcgggatttggtttggaatttatgcaagacttactaatgctattaaagaatttgaatgtgatgaaatacaaaagaatgaattgaatatttatttatttcaaaaatttcagaaaactgcaataaaaaattattataattggggcattactcccatttatgaaatttattcagtagcagaaaataataaggggttattaagatataaagtacgctttgatggaaatgctgaatttaacagatatattgcagaaagattttcaattgccaaaatttcaaataaaccagaaaaaaaaatatcaaaagaaattatgcaattatttgccactgttagtagatatgaaacaaattttattgtaagtaaggaaaacttattacatattttcaatttaattgaggataaagacaaagaatatttcatttatctattaaaaagattatcaaaacatattccatatgttgaaaatgtttcaagtattattaacaacaaatataaattagatagggaaaaaaatcgtcgtttattaactatgtatgcggaagaacttgataatgactactcacaaagtagacaaagaagaatatttgatgcaagatattttattccattttatcaatacgcaatgaaaaatacttttaagaaacattatagagaatcattaagaaatatgattgtggaatcaaatgcagttattgaagattttgaagaaattgaagattgtagaaagttttctgatatttatgatgcctgtgcgttcagaaaactgtgtgaagaggacgaagttcaaaatgatttggttatgtttcaaaggtttaatgatgaagtttcaatgaaagatagaaatggaaagttaataataccgttaccgatctatgatgattttgtatattattatcttttcaataaaaccaatgaacttagattcaaatcatatgctagatttttgtattatttgacaaaaaaggatgaaaaattagcaaaattaggattttgggatattttaaagactaataagaataatgatcatatcgaggatgaatttgctggagaaattaatgatataatcgattttaatgaattgcctaaattatatgaagagatgagtaatgaaaaaattgcaagattatttggactatattattttagtattaattatacagaaaaaatcaccactaatgagttaacaactttgattacaatgactgaaaacatattaagtttagaaaatttgggtaaagatatacaatctagattattatatcattcttttaacattattgctaaacattcagatttgttatcagcattttacaaaaaggttaaaaacttcatacatttttatactccaccagtcaatctagctgatgaattattattttcaattgttaagaatgatattaaagatattgattcaattatctatttaatttgtgcaaagtttgattctccaaaggttgaaaagatttttgaaaaagctattttgaaattaatgaatgatggattaaatggtttagcagaagaattgtatttaaaatgtattgaacgtaaaccaaaatttagaattcaagaacttaatgattcgttaaattggggtggtaaggcaaagagtccaactgttagaattgattcaaataatgcagttaatatgaaaatggataaatttcaagtgaaactatatgattatgcaaatcttgataaagataaaaaataagaaatgaaacttacaaagagttgtatataattaaatagaaataaataaataaacgttaaatgtagcattaggtattgaatcctttaagcatttcttctcttcttttacgacttaattcttcaaaactattatttggatgtttcatctgtccttgtctagtaggtgaatgattcctcttatattcttgagggagatttaaatttagttttccagtatttgatcttttacgttcttcataacgatgtactggatggtaatttttggaaacaggtggtttatttttattaataagtgtttcaagtttattcgttaaactattttttctcgtaagtgatattggagtactattttttctagttaatggaggtgttacatctgattcatattcattatttgattcggaatcccaaatattattagtttccgtgctactaattgaagaatttaatgatttagctgaagtattgaattttttcacttttggttcaggtatttcttcagttgatatggttgtagatgtggtagagtaattgaaataacaatagcaaaaaaatccaaaaacaattattaatgggaaaatacttgaattattagttgctggttgagatcgcaaaacattaatggtttccggatcagatgatttgaatattgtaaataaaagtttccctccaataagggtgaaaactaaactgggtatatgtattttcaatgatttatcatttgatatcattaaatcaaaatgaaggtccattttccaaaaattgtgaaggtttgaataaataactgaaagtatattcttaattatctttataatatcatttatatcaattgttgaatctgaatttatatcgttattgatattactatttgggaatatttttttaccatttcttaaaatgaaaggttcatctaatggatgaatattttgtgttgatttatctgtatcttttttatcattattatcgaaaacaacttcaaatgcattatttttcaattctttagaatctgaattattagcagatgataaattaggtgataattttggtattggtattattttatcattaatattatgagatcttatattttgttttgtgttatgaggtttttgtaaattatttgaagaagttaattttgtatcaaatgattcattagttggtgatggggatggagttctagttaatttttcaaaacttatatttttagttaatttatcaaatattttattcttttgagtcttcatgtctattgtatagagaagtgtttaaaaataagagatatattgattagatattttgtattgtttaattgttttatatagaatatgaaaaacacgtagatattgaatcaagattgatggagtaaatacgataggtcacaataacggtatatatcaataaatcaatgtgatcagcggtaattagaacaatcattaattgttatcaggtacttagtaacaatcgtcagatcaaaccagccacccctaataattgcctaatcgggtaaccggcggaacgatgaaaaataaatattctatgggggaagctttcttttaagaaggctgcttaatgagttaactagattaaattgaataaagtattatattatcaggttaaatacaagtaatataaaaacagggaataagttttatataatcctagtaataataatagattagaaataaataaataaataaagttaataaattaaataaataaattaatcaattaatcaacatacttatttgaatttcttaccgaataagataacttgtaattgatcgtacatggaaataacaccggcaccggcaacacctcttaagatgttagcaccacaacccttgaataaggatctaataccttcctttgcaacaatttgagagaaagcatcgaaagcacccttatatttgacagcttgaccagaagtcatcatcattcttcttctaacggtatctaatgggtaagaagcggtagaagcaccagtagtaacagcccaacctaataagaaagcagctaagaagttagtttctaatgaaccaactaaaacgactggctttaaggaatcgaataaaccaaagtataaacctctgtaaacaacaataccaacaacagatggtaagaaacctctgtataaacctgcaataccatcagaagcaatagtcttcttgtaaacatcgaataaaccattaaattgtctttcaccattaccctttgcagcctttgcatcatttgctaatctagttcttgcataatctaatgaataaacaaagaataaagaagttgcaccggccataccaccagaagctaagttacctgcaaaccaagtccagtaaccttcatctttcttgaaaccaaacattttcttaaatttatctttgaaagcaaagttaagagcttgagttgggaaatatctaataacattagcagtattacctctccagaaagaaacaataccttcttccttagcagttcttgagaaacattcaccaataccttcgtatctctttgctaatctaccttgctttaacatttcatcttgattttgaattaataatttaactctttcaattggagcagcagcagttttggagacagcagcagagacaccacccataaggaaatcggtccagaagttagattggatttttgattcagacatagttagataattatataaggataatactaagttaagaaactacctggtaaaagaagagaaaatcaaaagagaagttgaaagaaaggaaattaaaagctattaaaaagaggataaatggaatcaaatggacaacctaaataacttgagcggaggaccgtttattaaatacacttttggtgaaagtttcagcgaatggaaatttttcctttttcctttttattattatcagagagtatgagaattactatttgagatatttttaattgacccgtaaattcattttggcagttcatcagtaatttaattggttgattttatgaggggcaagtttttatctctgcacagacgtatcgtcgcttgggttcttttatttttttttcttttcttttccgtctcatcgtcctgcggcttattcactagccgctttgtaaatttacatttatcttagtatgatcttttgtggctggtgtgttaatagattatatcaacaatcactactagtaggtattacatgatacacatgtaaaacatggatatatttattataattttaatgttttattaaaagaagttataaagttattttaatatttatttaataaggtttcttaatatataagattaaaaattaattaatttaataacctaaagcagctaatttagttgaagcttcagattgagcaacagtttccttagcagaagctaatttctttgaagcagataatttctttgaataatattctgctgcctttgcctttctcttatcttctaaagtagaaacaattgattcatatttccaaccaactgatgcagataatttacctaatgaagtatattttctacctggttttaatcttaaaactcttaaagcttgtggaacaacaattctcttctttttatcatatggtggtggaacaccttcgaaaacctttaatctttctaatgcagctgcacctcttgcagttttatgtggaatcatacctctaactgctttatagaaaattcttgatggtgctctaaaatggaattgacctcttgcatggttaaagttagtagattttcttaaataatcatgatactttaatttatttctgaagaattcaccagaaacgttcatagattcacatctaacaacgacaattttttgaccttctaaaagttcctttgcaacaatagatgctaatctacctaataaatgtcccttaccgtcaacgacaacaactggttgaaattcactcatgtttggttgataattaaatatgtgaattagaaaataatttaaattattaaaaattaagaactagaaattaaaactaaaagggtataatataaaaatttcaatagtaatagattcaaaaaaattcttaatattactatgaaaatattttacctaactaactaactaacagtgtaccatcactataataaactcactaatatttgatgaaaatttcatagattttcaccgcactctctctcactgaaaatttccattgtaaattatttagtctctggtgtgagggtgggattgtgggattgtgcgcccattctatcttttctctctctattagatgattttcgcagtcacacaaattttcttatttttttttccatctcttcgcttaagttaccattttgggaatgttatcaaaaactgaatttattattatactaacagtatccttatcatgattcttatcatcagttttatttacaacaatataattatcaaccatattacgtataaatatcccaatatgttgtaaattaaatgaacttttacgccttctaaacggtaatataattgttttattatttaattcacataatttacgtaatttaattataatatccattatttgaacccttgccttatctctattaatgaaaaacgcgttgttaaatatttcatctaaatcttcaattactattatatcaccattattattattattattattattatcaatatcaatatcaatatgaatgaaatttattatatcatctagattaacatattgatgtattttaatcgattgtaaaatatttacaatattaatattaatattaaaatcattatttgtcttattttttttccaaatattaattgtacgattaatatcatgttgtaatacactaaagtatacaatattaaaattacgattatttttataattatcagtactatcagtattattactagttatatctctattcaatctattaactaaatacttccgtacataatcaattgttgaaataccattaatactttccacaattgatatacaattatccattgatatattttccttacctaataaataaatcgatgatagtgatagtaattgtaattgcaataataaacaaaaaatatctccctaatagtataaataacgtacaactgacgcgtaataatacataattaattataaaattataagaaaattcccctcccactttccatccctccccttcatttaattatcatcccaccccatcccatttatccaatctcatcccacattgattacctaagtattataaacggaacatcggagattcattatactccactacatctaacagtttaaagtgactctttaatagacagacggacatgcaacaattgacaatacagaatatatcttactgttgaagtatttaaacaacttatcatgccatttgaatttcaaaatttacgttgaattgaaatcaattgattttgttattcttatcttcaacttcttcttcatctttcaaatatacaatgtttgttagcaaagtagctacgaaatcaaatattagatcaagtattagatctttctctaatagtataaaatctaaatataattacaattacaattacaatagttataatagaaaatcaatttctaataacttgagattattagcaatcacaacaatatcattatcaactgcaactgcaatttatatatcatcaattaaagctgaaaatgattcaaatattaaatcaaaaaattcaatttcattagacgaatttataaaacataattcaaaggatgattgttggattttaattaataataaaatttatgatgtaactgattttataccaaatcatccaggtggtgtaatgccactgatatctcatggtggttatgatgcaacaatgatttatgaaaaattacatccaaagggtacaattgaaaaattcttatctgatgataaatttattggtgaattaaaattaaaagaaaatgagaaaattccattattagagagtgattataaaactgatgatgaagaatttgaaattcaaagattagataatattgaaaatttacctcatatttcagcaattcaaaattattatgattttgaaaaattagcaaaaggtatattaccaaaggatgcttgggcttattattcttgtggttcagatgatgaaatttcaatgagagaaaatcattatgcttatcaaagaatttattttaaaccaagaatttgtgttaatgttagagatattgatacttcaacaacaattttaggttcatcatcatcagttccattttatgtttctgcaactgctttagctaaattaggtcatcctgatggtgaatgttcaattgcaagaggtgcaggtaaagaaggtgttattcaaatgatttcaactttaagttcaatgtctttggaagaaatttcaaaagctagaatacctggtgcaactcaatggtttcaattatatattaatgaagatagaaaagttgcatataatatggttaaagaagctgaaaaattaggtatgaaagcaattttcgttacagttgatgctccatcattaggtaatagagaaaaggataaaagattaaaatttgttaatgaaactgatgttaatttaggtgatgatgtcgataaaagtgcaggtgcttcaaaagctttatcatcatttattgattgtggtgttgattggaatgatataaaggaagttaaatcttggactaaattacctgttttaattaaaggtgttcaaactgttgatgatgttattgaagcttatgatgcaggttgtcaaggtgttgttttatcaaatcatggtggtagacaattagatactgctccaccacctgttgaattattagctgaaactgtaccagttttaaaaaaattaaataaattaagaccagattttgaaattttaattgatggtggtgttaaaagaggtaccgatattttaaaagctgttgctttaggtggtaaagatattaaagttagtgttggactgggtagaccattcctttatgcaaattcagtttatggagaagatggtgttagaaaattaattcaaattttaaaggatgaattagaaatggatatgagattattaggtgtaactaaaattgatcaattaagtcctaaacatgttgatacaagacgtttaattggtagagatgctgctaattacctttatgacaataattatgaacatattgcaactgttaaatttaagaatgaagatgattaaataaatgattttgcgttttcttacagacagtcctttatcatgaattttttattattattacactattgttattattattcttattattattattcttattattattattcttaaaatatgttccataataaatgaaatatacgacttttatacaaaaaaatttgaaaaaacctatttattaattgatgactcttcatttactaacatttgattaagtaaactctgcgttttaagccaataatatcttgaagaatctgtttgtttaactaattcttcatcaaatagtttacgtaattcaacaagtttggaatgatatattgtttgtgtctctaatacctcctttaattcgttaactgaaagtttatcaatagtttcatcatctaattcattcattgatattatcttcgttatgttattattggtattttgctttatatcttcctttactttattatatttctcaattgattttttagtctttttcgttatttcatttaatattgatggattaaattcaatattttgaattttataatggttaattaatttccttatataaccaccactggtaattttatcattattattaaaagtattaataaattcatcatgattcatttcagattcatttaatattctattttcataacttaatgctatttttttaccacttgaattcagatcaactttaaaaccattctttatgtcaaaatctttgaatatttcatcctcttttttcttgtaattctcaaatgtctctaataatgaattaccttcaagattatgaactgattttgaatgttttaacaaggcatcacatctagtaaatgatttcaaacattcaggtatcagacaatagaatggcctttcacctgtatgtgttcttatatgtgataataatgcaaatctactatgttgtgggaaaccttttcttgaacatttcttccattgacatgcataatctggtgtacatactttatattgatgtttatcatcttttgaattcccatttccatttatatcattactttcaacttccacttcaccatctttttcattatcacctccttccattgaaggttcactttctttattatccttatcctttgaattaatcaatgataattgtcttaatgataaaacatgacagttatagacatgatcaaccaaatgatccatttctttgaattctatatcacaatcatcccatctacaaatatgtatatcttttgggtctataaattgtgtattatttgattgtggttgttgatttggttgtaatgatagatttttgagttgttcaactctttccatattttgaaactcttgttctaaatcttcatctgatattttagatgatgcaggaatgtaatttcccgcctgatagttttgataatccattgtttgtttaataaagaagtgtcatatataaatgttgtaacattacaaattatagcagttataccactacttacagaacatgctgcaattgaaaaacgcttatgtaattttgaaatttttccatcattttcaatttcatgttttcgacgagttcctcttaataaactgttaaatttaatttttcattagttggtattagtatactggatcttctctttgaactttcacaaaccatctgcaagtatgtctggcttacaactcaatatcttgaaggtattaggggaaaagggttctatccctgattcaagtgttgaattcccaaatgaagaatctcaacaaatccaagcagcacttaattcattactcgctagagcaatgattacttataaaactcaagaaactgaaatttatagtttaacagacgaaggtaaagatattgtagcaaatggatctcatgaatatagacttttaaataaagttattgaaagtttagaaggtttaaaagtttctgatgttgattctgttatgggtaaaaatggtaaagttgcacaaggtcgtgcatttaagaatggttggattagtaaagatggtgacaaacttgttactaaacttgaaaatgcatcatctgttgatgatactacatcagttcaattaaaggaaattgtttcaaatggttcattatcaaataagaaagatttagctgaattaaagaagagaaaattaattattccaacaaaacattttaaattttcaattgaaaaaggtccagaatttgcattagaaattaaacagtttgaaactgatattacaactgaaatgattcaatcaggttcatggaaatctgctaatttcaaaccttataattttaattctgaaggtgatttaccaaattctggtgctttacatccattaaataaagttagagaagaatttagacaaattttcttttcacttggtttttctgaaatgccatcaaatcaatatgttgaatcaggtttctggaattttgatacattatttgttccacaacaacatcctgcaagagatttacaagatactttttatttaaaagatccaaaagttgcattaccaccaagtgataaagaatttttagaaaatattaaaaatgttcatcaagatggtgcatttggttcaattggttatagatatccatggcatttagatgaatcattacgtacagttttaagaactcatacaactgcaatttcttcaagaatgttaaaagatttagcaaaagatccaaaaccaacaagattattctcaattgatagagttttcagaaatgaagcagttgatgcaactcatttagcagaatttcatcaagttgaaggtgtctttgcagattataatttaacattaggtgatttaattggtttcatgcaacaattttttgaaaaaatgggagtgactaatttaagatttaaaccaacttataatccttatactgaaccatcaatggaaattttttcatggcatgaaggtttaggtaaatgggttgaaattggtaattcaggtatgtttagaccagaaatgttagaaccaatgggtttaccaaaagatttaagagttttaggttggggtttatcattagagagaccaacaatgattaaatatggtgttagtaatattagagaattattaggtcataaagttaatttagattttattgaaaataatcctgctgcaagacttgatgatgatattttataattattataattattataaatcattatattttcctaatatttaatcctttatatataatttatataatatattttccatttttataaacaaattaatttttcattgattcaaatcgataaaattcaggtgttttgcacggctgtaacactaaaaaattaaaaaactgattaattttttaaattttcaaaacaatttttagcgttcaaaggtgggcaaaaaaacgacctcttggaacagtgccataaggtttaaaaacaactttttttttcaaatattataattttttgtaaaaaatcacgtgatgcgttacgtagtaccgacttgaactagataattaaaactataataattgggcgtgtggcgtagttggtagcgcgttcgccttgcaagcgaaaggtcatcggttcgactccggtctcgtccaaacataaaaaacaattattaaacttatttaaaacaaaactttttttcatttaatttaaatttgcctaattactttaaagttttactttataagtagttattgttcaagcgtcacatcgacgcttacaaatttatttattagttagaggggaggttgggttttaatttattttatttaattgtgagaaaagggtaaaaagggcttttacactgtgttttagctctttcaacagtttaaatttgttattccgaactgataagagtttgacaggttggtgataatattgaaaatattctttaccgtttagcaagttcttatagttactttgtagatatatgtgttgttgataagacatgtgttagtatgaatattgttagttgtagtgttaccgttacttaactcttgtgaagaaaccctgttatgaaagagtcaagattttacgtaagactcataataataagaaaaaaaaaagaaacgagtggaaatatagagaacaataaaagataatagtatattaagtcattaaagttgcaatacattaaatttattaacagagtattactgactattactcttgtgatacaactgttactaacataatgcaataataatagaataatcaatatgcatcgattgatcaaagacaaggccttgtgacatcactatcctcaacaaagaaaaaaatattttttttttaatttttcacttcgcaaaaaaaattttttttttcactttctctgtttttatgtataaagttaccaggaaatctttaatttttgaaatatcccttaaactggcaactattttttttcctttactttaggtattttaatccattttaatattttatacacattcttttctcctcttccttctccagaacagacccagctgatctaatctcataccaaacaaaaagaaaacattctagttttattcttaatatcaattattaactaaaactttattatacttttgatttacaaattattaacccccatatatttataaatcatttactcaattcaattgttttcatactttgaaattattactatatctgatatatttttaaatttaaaaggtatgtattaaattttattatttgaaattttgaattttttttattttactcaattttttattcttttttacattgatattattactgcattatgattaatttgatacaattagatattactgttttggagaaggaaaaagaaatgaaatgagaaatttaaatactacaaattgttatactttttggaattggaatttgatctttaactttcctttacttctccattacaacaatttaatctaattgtaatctttattaattgttattgtgagtattaattaattgaatgtaaaaaactatattaaattttgtaaagtgttcaaaaattcttataagcccacaaacaaacctgaatttttatactaacatgaaaaaaaatgactttcctcgttggaaaaaaatttaaaaatatttttttcattacagcattattttaaattaatcacagccaaaacttattattatattattattattattataaaatatttaaaattacacaatggtttttcacaatccaatttccccagcatttgaaaagctcggtaaaaaattagttactttagaaactcaagatggtgttgcaattcaaggttattcatttggtgcagatgttgaagcagccggtgaattagttttccaaactggtatggttggttaccctgaatcaattaccgatccttcttatgaaggtcaaattttagttatcacttatcctttagttggtaattatggtgtcccagatagaaatttaatggatgaagttgttaaatcaattccaaaatatttcgaatcaaataaaatccacgtttccggtttagttgttgctcattacactgaagaatattctcattacttagcaacttcatcattaggtgcttggttaaaggaacaaaatgtcccagctatttatggtgttgatactagatctttaactaaaaaattaagagaaaaaggttcaactttaggtagattttgtcttattaaagattcagttgatgttgatgcagctcttgcagattctgaatggcaaaaaaacttcaatattccaaactggattaatccaaatgttgaaaatttagttgctaaagtctcaactaaggaaccagttatttatgatcctccaactgaattagctaaattaggtcctgatggtaaagttattagaattgttgcagttgatgttggtatgaaatataatcaaattagatgtttcgtcaacagaggtgtttcattaaaagttgttccatgggattatgatttcaataaggaagaatatgatggtttattcatctctaacggtccaggtgatccatctgttatgactgatgttgttgaaaaattaagaattgctttagattctgcaaaaactccaatctttggtatttgtttaggtcatcaattaatggcaagagcttcaggtgcttcaactttaaaacttaaatttggtaatagaggtcacaatattccatgtacttcaactatttctggtagatgttacattacttctcaaaatcatggttatgcagttgatgtcaacactttaacttctggttggaaagaattatttgttaattctaatgatggttctaatgaaggtatttacaatactgaaaaaccatatttctcagttcaattccaccctgaatcaaccccaggtccaagagatactgaattcttatttgatacttttatccaatccgttattgaatttaaacaatccaaggtcttaaaagcagttcaattcccaggtggcttaaaggaagataatgtcaaattacacccaagattaaaaccaaagaaagttcttgttttaggttctggtggtttatctattggtcaagccggtgaattcgattattccggttctcaagctattaaagcattgaaggaagaaggtatttacactattttagtcaatccaaatattgcaactattcaaacttctaaaggtttagctgataaagtttatttcttacctgttactccagaattcgttagaaaagttattaaacatgaaagacctgatgcaatttactgtactttcggtggtcaaactgcattaaatgttggtattaaattgaaagatgaatttgaatctttaggtgttactgttttaggtactcaaattgaaaccgttattactactgaagatagagaattatttgcaagagcaatggaagaaattggtgaaaaatgtgctaaatctgaaactgcttcaaacattccagaagctttagaagctgttaaagaaattggtttcccagttattgtcagagctgcttatgcattaggtggtttaggttcaggtttcgctgataatgaagaagaattaattgaactttgtaacaaagcttttgctgcttcacctcaagttttaattgaaagatcaatgaaaggttggaaagaagttgaatatgaagttgttagagatgctttcgataattgtattactgtttgtaatatggaaaattttgatccattaggtatccacactggtgattctattgttgttgcaccatctcaaactttatctgatgaagattacaatatgttaagaactactgctgttaatgttattagacatttaggtgttgttggtgaatgtaatattcaatatgccttaaatccattctccaaagaatattgtattattgaagttaatgctagattatcaagatcctctgctttagcatctaaggcaactggttacccattagcttatactgcagctaaattaggtttaaatattccattaaatgaaatcaagaattctgttactaaggttacttgtgcatgtttcgaaccatcattagattactgtgttgttaagattccaagatgggatttaaagaaattcaccagagtttctaacttattatcatcatccatgaaatctgttggtgaagttatgagtattggtagaacatttgaagaagctattcaaaaggcaattagatcaactgattatcaaaacttaggtttcaactcaactgaagctttaatgagcattgatattgatgctgaattacaaactccttctgatcaaagattatttgcaattgctaatgctatgtcaactggttatgatgttgaaagaatttacaaattaactaatattgatagatggttcttaactaaattatatggtttaattaaatttggtgaacatattggttcatttggttcaattgaaaaattaccagttaaggtcttaaaggaagctaaacaattaggttttgaagatagacaaattgctaaattcttaaactctaatgaggttgcagttagaagaactagaaaagatgcaggtattattccagttgttaaacaaattgatactgttgcagcagaattcccagctttcaccaattatttatacatcacttacaatggtcaagattctgatgttaaattcgatgataagggtgttatggtcttaggttctggtgtttatagaattggttcatctgttgaatttgattggtgtgcagttactgctattagaactttaagacaacaaggtttcaaaactatcatggttaactacaatcctgaaactgtctcaactgattatgatgaagctgatagattatatttcgaaactattaaccttgaaagagtcttagatatttatgaaatcgaaaattctgccggtgttattgtttctatgggtggtcaaacttcaaacaatattgcattacaattacaaagacaaaacttaaaggtcttaggtacttctccagctatgattgattctgctgaaaacagatataaattctcaagaatgttggacaatattggtgttgatcaaccagcttggaaagaattaacttccattgaagaagctgaagcatttgctgaaaaagtttcttacccagttttagttagaccatcttatgttttatctggtgctgctatgaacactgtttattctaaggatgatttagcttcttacttatctcaagctgttgaagtttctccagattaccctgttgttattaccaaatatattgaaaatgcaaaagaaattgaaatggatgctgttgcaaaggatggtaaattaatcatgcacgttgtcgcagaacatgttgaaaatgccggtgtccattctggtgatgctactttaattgttcctccacaagatttagctaaggaaactgttgatagaattgttgaagcaactgctaagattggtaaagctttagatgttactggtcctttcaacattcaatttattgcaaaaaacaatgaaatcaaggttattgaatgtaatgttagagcttcaagatctttcccattcaactctaaggttgttggtactaatatgattgaaatggcaaccaaagctattatggatcttccagttactccatacccaactcaaaaattacctgatgattactgtgctattaaagttcctcaattctctttctcaagattatctggtgctgatccagttttaggtgttgaaatggcttccactggtgaagttgcatgtttcggtcacaacaagtatgaagcatatctgaaatctttaatttcaactggtttccaattaccaaagaaaaacattttattatctgttggttcttataaggaaaaacaagaattattaccatctattagaaaattagcccaattaggttactcattatttgcaacttccggtactgctgattttattcaagaacatggtattccagttaaatatttagaattattaaatgaagaagaagaagaacaaaaagctgaatattctttaactcaacatttagcaaacaacttaattgatttatacattaacttaccatctgcaaacagattcagaagaccatcatcatatgtttctaagggttaccaaaccagaagaatggctgttgattatcaagttccattagttaccaatgttaaatgtgctaaacttttaattgaagctattgcaagaaatgaaattttagatgttgatgctattgatgctcaaacttcccacaccactgttcaattacctggtttagtttctattggtacctttgttccaactttagatgaatctggtgctgctgcatttgaacaaaccactaaagcttcacttgcttcaggttttgttttcaactcaatcattccatacactgctgaaggtgctgctgttgttgatgcaagaactttaaccagagccaatgaatttatccaaggtaatgcatattctgattactcattatttgttgctgctaatgaaactaactcaactcaattacaacaagttagtgcattaacttccgcattatacattaatgctgaagaatttgatgcaagtgtcattccatcatttgcttctcacttcggtgcatggccatctaacaaaccaattattgttgatgcaaaatccacttctcttgcttcattattattattagcttcattatttaactcaaagattcatgttactaatgttaccaatattgatgacttagctttaatttcaatgtctaagaagaagaacttaaatgttacttgtgatgtaactatttactcattattcttttctcaatctgattatccaggtgcttcattcttaccaactaaggaagctcaaaaggcattatgggataaccttgaatcaattgattgtttctcagtcggtactactccatacaaattagctaaacacttaggtgaaccaatctctgcaggtcttggttttgctgattctattccattattaatgggtgctgttaacgaaagtaaattaactattgcagatattattgctaaattaaatgcaaacccaattgctatccttggtttaagtcaatctgaatcttacattgatgtcaaccttgatagaaaaacatcaaccttaaaatcaccagttaaagtttggagtcctgttaaggatgctgttggttcagttgaaagagtttacatgaatgaacaaactgtctcattagaaggtgaatttgttgttactgaagcattaggtaaggaaagtattgctcaacatgcatcatcaatttcaaatgaatctgctgttgatacttcatcatcattaccattaggtatttcatcaccaaatgttagaagaggttcaagattctcatttgataacaatagaagacgttcattaattgattcattaaaggaaggtgaagaagaaactacaactggtgcagatttagtctcaaccaaaccaccaagagaattatcaccaccaaatgctatttcaacttacattaaaggccataatccactcttaagaaagaatattttatctgttagtcaaattggtagacgtgaattacatgcattatttactgttgcacaagaaatgagattagcagttgaaagagaaggtgttttagatattttaaagggtagagttttaactaatgcattctttgaaccatcaactagaactgcatcatcattcaatgctgcaatgcaaagattaggtggtagagttgtttcaatttcagaacaaggttcatctgttaaaaagggtgaaactttacaagataccattagaactatggcatgttactcagatgcaattgttttaagacatccagatgaagaatccgcagaaattgcagataaatattcaccaattccagttattaatggtggtaatggttcaagagaacatccaacacaagcattattagatttatttaccatgagagaagaattaggtactgttaatggtataactgttacatttatgggtgatttgaaatatggtagaccagttcattcattatgtaaattattaaaacaatatcaagttaaagtttacttagtttcaccagaattattaagattaccagaaaacttaagaaatatgttaaaggaagaaggtatgttaattggtgaaagtactgaattaaccacagaaataatttctaaatcagatgttctttactgtactagaattcaacaagaaagatttaaggatccacaacaatatgaagcattaaagggtgtttatcaaattgataataaggttttgaatgatgcaaaacaacatatgtgtatcatgcatccacttccaagagttgatgaaattaaggaagaagttgatttcgatcaaagagctgcatacttcagacaaatgagatatggtttatttgtcagaatggctattttagcaatggttattggtgttgaattttaatcactttaatacattcaataaaacatacaaaaaaaaacaattacgaatacaataaattacaattaataaaaataagatggtagattaaaactataatgaaaatttcaataaagtatattggggaatatctttacgaataataaaattattattttttataacattttaactttacattttacagatttataacttttatatagcaattacaattaataattaattaaaattttaagaataggttcgattattcgtaaaactacattaattaaaaaaagctgaggagtatggttacaatttgaaaatcttgtaagagatgttaaggtttcggaaggtaagatgcaaaaactagttttaaaaacaattaactacttgtgcctcctgtcggaattgaaccaacgatcttcgcattacgagtgcgacgccttaccacttggccaaggaggcaaatatcaagctgctagaggcaaataatttacgcgttgcgtagacgtcacgtgatccagcggaaagctatctttgagtggtgctttaatgattttaaagggtcatctctggaaattttaaactgttctaatattagtaaaagatattattttgtttttccatcaaaaatagtaaaaaatacaggtgttttctttaaaaaattttgcatttttaataacatttacagctagctttggaatcaaaaaaaataattcacagacttttaaaaatttaaatttagaaaagtcattcaaaagtctaaaaataaatataattaacatgattcatagtagctaatggataaaacaaacaactaatggattgaataacttataacatgctcattatgactgacgtaaaacgtgcatccaacttgagtttgtgtgcattaggtaataaattaaaacacgcgaaatcatagtaaaatgcccaaatgtcaagaatttaatgtttgtttattaaattgatccatttagttccttcttaagtggcaagggtaaacatggttacagtcattgagagttcatcagcggtatgtatctaataagtccaattttttttatttgtgaacaatatactaacatcaaataacatagttgagaaaaaagaaaaatttaaagaaatctttaaattttacaattatggttgttggacaatcaggttgtggtagatcaacatttattaatacattatgtgatcaaaatgttgttgaaacttctagcagtgttaatgattatgaagatagagaattacaattaaggaaatgtaaagttgaattagaggataatgaaggtgttaaaattaatttaaatataattgatagtccagggtttggtgatctaattgacaataatagttcatttaaggttattaaagaatatattaaatatcaatttgatgagattttagttgaagaaagtagattaagaagaaatccaagatttaaggatggtagaattcatgttttaatatatttaattaatgcaacaggacatggattaagggagattgatgttgaaattatgaaagagttaggaggatttgttaatattttaccatgtattagtaaaagtgattcactaacagttgaggaacttaaacttaataaacaattaattagggaagatattaaacattacaagataccaatttttgaatttaataatgaatatttttcatatgatgaaaatttagatgatgaaagtattgaattaaataaatatttagataagagtataccatttgcagttatgggatcgaattcagttgttaaaggagttaatggaagttccgatgaagaaaatcatagaattagaaaatatccatggggagaagttgatgtatatgataatgaacttagtgatatgactacattaaagaattctttattaattacacatttaaatgaattaaaggaatttacacatgaagtattatatgagaattatcgtacgaagacattagcagagggtggagctggaggagatgaatatattgaggaaagtgttgttgaagagagtgtaaatgagattgatgatttaaaggaagaacaaattagaaaagaggaagagaggttaagaaagtttgaagagaaagttcaaaatgatttacaaatgaagagagaagaaattgaggcacgtgaaagagaattggcggaattagagagacgtcttgctgaacaaagtatagtataaatataaatatatgtaagtatatcatacaaatacaaatagtattcagagatgataattatataaaagacataatatagttaaattcaaatttaaatttgcacatgcacacgagtaaaactgttgttgatataataatatagaaattcacatgcacacgacactgacctcttttaaggcttttatatttggtctataaaaggacatgaccttgcccttgtttgtcaagtagttattatatattgattgtatatactcctcttctttattcaaacaacaatggatactttacaatctctttacaatgatgtggacttctctaacaagaagttccaaactgccctcttcttcatcgttttcaatccgctctactggaactttggggctcgtcttgaatactacactaaacttatctccaccctttgtctaggtcaaaaacgtgttgcagtttatcttttctcattgactgtcttctctctaggtttattaagagatgaactttatagagctgctcttcaagaacagaaaacttccccattattagataatgcattatctaaaatgctcggagctggtgctttcacttacggctcagctcttgtcttaggttcaatgtataagttaggtattgttggtacatatcttggtgatcattttggtttcttattcgatgaaagaattgtttctttcccattcaatatttgtgataacccaatgtatgatggttcaactctttgtttccttggtactgctctcttttatggtaaaccagcaggtctatttgccactgcacttgtttatgcaatgtacaatatcgtccttctcattgaagaacctttcactgcaatgatttacagaaacaaaaaggattgatttatatatttttattaatcattaactttatataaatcttacttattatattatattttattttattgtgtaaatatataaattatttaaaccaagttaagcatatttcttatgaatcgagtaacattaggtgttgagagaaccataatttcaccttctttcactatttcccaataataacctctttcaatttgtttaacagagataaaattacaaccttgaaatgtagcactgtacataacttgtaaatgcgattcaccaaatgctttctctatttcatcacgcataattttgctatcacaaacaatagtattaatctttactttcacaatttggttatctttcaatttctttattaactctccaattttcaaattttgatcattatccgtatatgctaatcctttaagatgtaaaagaataggtaaattcaatacatcattagtatcatcaaaaatcattttcaaaataggtactatgaacttctttataatctcactcaactcataaaagcaaacacaaatgaaatttacatattcttttttgctatccttactaaaatgatattctaatacaattgttctgaaaatatcatttaccttttcaattaatccatttttcatatatggaagaaacccataaattacatctaacgcaattattttgatgccattatttgaaatccagctaggcttttcaaacttgatttcacaaacttcctctatttgggttttgaaaaagttaagaagttcattcatttcaacattgttcttctccaacaccccacttaagttaagcaattggtttcttaggtctttagtcactaataagtatctttcaaaactcttttcattgtttaatacgtctgaatatactttaaaaagcttttcaatattaaaatttacactaaattctgctcccttttcaaaaatcatcttgaaacttcccttaagattcatattaaaatacattttatttatctgctcctcaatttcataaccataaacacagctcattgattcccaatcttttatttgaaatcgatttttgttaaatctaattcgacccataattgataaattgatagcaaagatttcatcatttttaactttacttgcaatttccattatattatccatagcaataacacatctatcatcactaatagtcataactaactgaacaataacttgattcattacaattgcattcttatctccatttatgatacttttttgataatcatctataatcttttcaaacttatccttttctagctctttaataaactttgcaatttctccaaaaataagttcagcatctaattcaaactctaatccaattatacattgataaaataaaatatcaacataaaaatttatagtttgatcatctaagtttaatgataaacaatatttcattgcatttcctaataattctaaaatctgatcagcacatgtactataatatctttcaacaacattgttacatttttccttccaacggggagcaccacatacacataataaattacttgaataatattttataacaaactcaatattataagtatttaaaatttcataattttgatccagatattcaactaatcgttttacatgatatttatttaaatttagattttgtaatttattaaacaattcctgcattacattttgaaatgaaacatcatattcacttccattgtaactaatcaaatcccaaaaaatatcattttcaacaaattcctcgtaatatccattcatacagtaaggcttttcaataacttcattgacaaatttaacgatttcaatgaaaagcatctcacttttatcattttccatcaagctttcaaagatataatacctatactcatcaaaaaattgagtgaaaactttattagttcccaataattttagtagatagcataatattcgaatacttcctataacacatcgattaccctttctgtgtggatacttttcattatatttacaagatataacatcacataatgttattagaaatgttgttccatacttttgaaacatcgttccaattatattttcacattcctcaatggattcatttaaatcataaacgcatccaactattgtcaaaagggtgtacaacttgtcaatatattcaccaccaactgcaatgtaattttctaaaaaattgatgaatgattttaatacaagtgtatcagtggatataatactcaaattaattaatttttcaaaaacatttcccaattgactagttttaaccatttcttgagttactagggaaattatcaaaacttttatatcatcgtttttataatttttgtcaattacattaaataaatcaaccaaatattcccattcaactactttataatttgccaattggtgtaaacatataagaattaatttcatatctggatcaaattcgtaatgaatgttctttttcaaatcatcatatagatttttcgcagcatcaggagacatctcattaaagctcaaaatcttctctaaaactttgaaactttcacttctaaatttccctaatcttttcaaatctaaacttgattcaatcattccccatatctgaatcctcttttccattggaatattgatcatttcatcacctaatatttccaatatgttgagtatatccgtcttacttcctttttgtaaaacggcaatcagtttatcattatccacaacaaatacaccactctcaattctcacaacatccttaacatcactatatccactgatccagtctatcaacgatatcattgatctaatgttgttcaatacaaatatgattgataacaaagtccgcttgttccgaaggtaatagcaagatgcgcatggcatcagattttgtgggaaaaattatttctcaccaagttttgttacttgtcattaccacttgttgttcctttaatcaagcaataaatctataaaaatgtgtaagaatccaccaccagtcgagccatggttatattggttaactatttagacaaatgcaaggtgtggaaattatggatactttaatgaataaatttggaactaatttaacaccatactttttaagtattggtgcaagtatggttggtgtgtttattggttcaatatatagtgataatgaatcattgttagaatttcagagacatttagatcaagaaagctattttagagaaatggtggagcattttgttggtaaagaaatgtttttttcagttttacaattatctattggtattatggtatttgtattcttcatgtttgccttgtttttaagaatgtatgtctcaaaattaattaactcaaataataatgaattgatagagggaatgatggaaagacttcaaaagatggaagatgttattgaattagtattaaaagataataatgcgttggatttaaaacaagtcaaattatttaaccaggagattgaagaacaaaagaaatcattcaatgatttgatcactaataaatcattagaacttgaaactaagctgtctgatgtcaaaaatacttgtgttaaagtgaagaatctggttcatgttgattataaaaaaataatggaaataagtagtaaattcactaatatcgatgaaagtgttcaagatatgtcttctaaagttgagaaaatttttgagaaattggatgatttacagaaaaaagtcgatcaaacatttaacgaggtcgagggagagatgaacaaggaattgaaaaagattaatgatttgtcaaagtcgttacatgaacaaaatgacgtaaatgaattaaacattttgaaatgtaatgcaatgttaactaattcaagaatattattggatgcatcaattgctaaatttgaaaatcttgagaaatcagcaaatgaacctatctctgaagattcaggaaagttaatatgttgtttaaaggaagctgttcagttaaccgaatttttggaaaatccaactagtactaacgataattttagtaaagaattaccatttcacaacaattcatttacaaactcaataaactcacttgtttttgaattgatgaaaaaacttacaacaatggaagaaaaaatgacaaatcagctatcaatgattaataaaaatacaagtaaaatcaaaaagttggatgttcaaactacagaaaaattaacagatttgaagttttacagtgatgaatggattactgcttgggtttctgttatctatagtttatttaatagcagctttttgcatttggagacacagctttttgggattgattctatggaatatccaaatatttttgattttaaagatgctgaactgaaaaaacattctaaaattttttatcaaattatggatcaatgtaaggaaacatgtctaaaaattgtgaaagaggttaacttgctgatttttgagtattatttggtacaaacaacttacacaaactccaacacttcattattgtctatatgctataaaaagattgatgacgagcttttcaatttatttgaagattttgaatttattgttaaaaaatcagaaattccattgaagaaacaaactgagatcataaacactctatgtagacttaaatgtgacttgtcttcagacttaaaatcagatactgatagatttaatggattggtgaaacaaaatttggatgacttttatttaattcatgatacaatgaagtctttgttcaaagatacaggatccttacaaataagtgataaatccgtatcattaaattatgattctgttattgaattgagtgatcattccaattctattatttcagtttctcatgaagattcttccttttctgaaaatgattcttcattggatgattcagctttacgcccattcaagttaaattcagcaaagagaagatccagagatttagattttgttgaactataataaatctgtataattgtataatttggttaagtttatggtatgttaatactatttcgtagattcaattattatatagtaactcagagaatttagattaaagtccgaattgagttataataactcgctcaaaaacttactgtatcaggaaattttaacttttgacttttaattttcaattttcaattttcatgattccgattaatttaaagaaaaggtcttccttgaagattaaacacgctgggatttattacaaacaacacgaaatatgtcaaaatcagtgatactacttaaaaatgaaacaacaccaaaagatccgtataaagagatttttgaagaaaaatcattagatgctttttttgttccattattagtccacaatccaatcaaccatgttgaaattgtaagttttcttacatctgaaaaatacttaaatgaattcaaagcgtttattattacctctcaaagatgtattgaatcattagatcttgtattgtcgttgatcaaggaccaatcagtgttggatcgtattttaagcaaaccagcttacactgtcggtcctgcaacttatgatgttctatcaaatttgggcttcaaagatatcagaggtggcgcagatgcaggtaatggatccattttatcagacttaatcatcaaggatgaattatttcaagaagacaataaaaacattttattcttaactggtgaaatacgtaaggatataataccaaaaaagttattatcttcaggttttgatttgattgaactggttgcttatagaacagaagttatggaagatgttgttgagcgttatactaatatttataactctatcaaagacaaggaacatgaaaaatggattgttttttttagtccacaaggtactgaaaagataactcaacacttagtcgacaataattcaaatttcaaaattgcaagcataggaccaacaacagaaacatacttacttgaaaaaggaataaaaccagactttgttgcaaagaaaccgactgcagcatcattaatagaaggtatatattagaatttaaacgtttatagattataaaaagttaatgtacatgtaatgagctactcaaaatgagtgaataattttatttaattctgaaacaactaaaatactttcagaaatgtttttgtaatcgagatccatagcaatagataagttacttttgtttttaacttcaatagatggcaatatcaactttcccacctttaatggcaccaatgttagtttaaatttatattcaagacacttttttttcataagctctttcaaattaacagaagcttctaaagttttgagtccagatataatccatttttgatcataatcgctaaatgatatttctaagtttgtatatgtatcattatcaggttctatattaccattactagattgaaatctaactttcttttcattagatgacgataaatcaaattcctcaacttgactaccaaaaaatttcaataaatgaacatctaagttaatctcaatatcaattggttcacatacaaggtattgcaacattctatcaaatttataatcgactatattgataatatttaactcaggtaaacttactggaatatccaattcttgttgcacacttgaatataataaactcttgaagttttcatcaacttttaaggaatttagggaatccagaaatttaccaatatgattgatatatgtgtccttataatctggatcaaaataagcaaaaaagctaccaacatccacgtcatccctgtttaatataaaaattgtaccacttaatgcatacatgttcaacttaaaatcaaagtttttccagatatttgaaacaatagacttaacacttgaaaaattcacattttgtaaaagtgaagcattattggcctcaagatatgcaatgaagttcatgtttagataacataatatttcatcttttatcgtattatattttatctgtagtaaaacgctaccattgacaaaatcagtgattttgtaaaaaaaagtagtaccttgatccataaatgcaataatattacgtggtaatttccatgattcaatctcacaaccttttggtacaagactcacactctggatacgaactggatgttcaattgaaattgaattaatagtaaagtttgaaaatattgcaaatgagggaatatcgtctgattcatccatattttttattgatttgatggtttcatcagcagccactgcaattgggagggagctttctatttgagtaaagtacttgagagagcatgtgatttggtcatcattgcctttgatagaatcaaattttattgcataatatacatccaaaatggtattggaaacatctggtgggaaataatatgggatttctacaaacacaatagtaccaggagtaaatacatgcttcgcttttggtttgaaagatatagttttctcattctctataatatctatgtcaatagtttcataactgtcatctttatatgatttcatttgatatgtcgaagatgcatctagtttgtctgtatcagtcttgatgaatttcaactctagatttgcaatttcactggatcccactattgtttcgaataagattttatctgagtttaaaaatctaagctttggaattctcacaattgcagaggtattatacatcacttgttctgacgatttgtcaatatatgtttcaagtggaacaatattaaacttaaagtttactggttgattaatttctaaattaccgacactgatgatcatattagttgccttaaaatctccatataatagttttgagcaatgtaaaataatatcattattttcttcaagtaaaacttgactagcaacaaattccacaatattgttatctttatttctcatgatcagtctcactttgtcaacattacaggctatcttagagttcatagaaattttgattttatagatatctgattcttcacagtaaacattggaagcctctttcaacttgaataaattttcaattttcatagtatgctttctaggtaattttacacataaggaacaaaacttttcttcctcaaactttgcacttttattgaccatcaaattaatataactagataataattggaagataactgaatcaccatgggtattaacaagtttatccaaatttgcaatatatatctctaaaagtgacaaaccaatgtatttccaaccagtttcaaaaaagaaattatatgattttgccaattgatcacaagaagtttcatagtcatcagttgagtaaaataagattaacgctagttcagtcgataaagtcgctaaggtgtttgaattagtaactgaattatcatatattgaaattatttctcttgtcagctctataatataatctataaacgatttttcggtagtaaaaattctggtaagtttttcattttgaatagtataggcttctatatcaaactgaacatccactaaagtcattgaaccttttacactataacattttgaggtacccaaagcaataagttcatttctttgaagtaactttaaccttcccatatatgtcaacatatctgcatttggtatttgtgtgtcttcaataagctttgacagcctttcattatctaaaaactcattcactaatataaaagaaatttcgtttttcttgtaacacatctctagtgagttcaaaaacccaatcaatgtttgtgctaatatgcataaattttttatgaacactaaatccgtgtactttgttagcattaataaatctcgctgtttatgatagtagtacaattttaaagtaaaattagaagcgtccgatggtaattcttcatttttaatgatcttataggtattatcgatatcaatattttcaaattcagatttaggcaagtattgtgttttattgaaaagtttagaataacaagccattgcactatcgtattgtgataaatcttgaaatatcgttgctgttttgatcaaatcctcattataaaatgtcaattgagtgttgattgaatgctgtaacaatgatttaattgatgtggttatatttttccaagcctcaattctgtcttcttttaacggatatattgatttgactttgaaaatattttccgtttcaaattctttattatcaaaatcgatctttaatttattgaatatattggtttttaaatatttatcagttgctgttcttaattctgaattttcaaaaaatatgataaagtatggtactgtagggttgattgattttatactacttaaccattgtaaaactaacggtcttaccttagctcgataatcatcaatggattgacaggaaatgaacataaatctcaaatatttcaaatctttatgttgtgtatgaggtatttcatccttgaaattaaaattaatatttttaagaactttcatacaatcttgattatctttccagtagaatgattgaatatttacatgttttttaaaatctgatctaaaacctccctgaaaaattgaaaaagggtcatataatcccacatttaaattcatctgaagatcggagactccaattgacataccagctgtttagttctcaatcaaataggaatcaatgacaacaatttcttccccagtttgttctaagaatgaagagattcacatgcataaatggtagacgttaagatcaacaatcttaagtatggtgtacagatcgcgtacactgaaatatagcaccgcgtcgatgggtctgtttccagtaataacatgaatgtcaaaattattttgaaagttttgttgatgttttaaaactgttttacctgaatatattatagtgtaaactttgaaatacatcatataggtaacagtgtactctaaatatagggtattattatttacttgttttcaattttagaccctccattgatgagtaacaatagaaaccaaacaatggaaaattcaaataataaaattgctgtcaatggatctaatgacaaactcataatccatctttctcgaaggaacactttaactgatcaagcaactagaaaacattatgccaataatcccaatgttttatttgtgtatgatgaagatgaaacaagagaaaattccgaatattggatgacaattgcaaaaagagctaatatcaatattgatatggaagatgaatatgttgattctaattttcaacataaggagaaagattcttctgatttattaggtcaattgaaagacagatataaatcttatcaacagatgtcccagaaagatgaagatgattattataccaatttagaacgtgaatttaaattaaataaagaacgttgcaaacaacatgatctaaatgctgaactaaaagaaaaacgtatatctaaattaattgatcattttcaaaaagttaagcaaaacgcagattttaatgatattattgaaaatgaagatgatgaacagaaagaagatgattataaacaacttgaggtatctgaacattccgtagatgatttgtttgaaggagatagtgataataatatcagtcattctgattcaaatgttgcatcagaatcaagtataatcatgattgaaacggagagtgaaggtgaaaatgaagatgagatacatatcaaaaactactcagatgatgaagatgcaaacaatatgttttatcaaaaaattgataatggagctgaagaaaaagaagaagaaagtgatgaagctgtgcaacttgaaatggaagaatatatggaagatattaaagatgaaggggaagaagaatttgcatatcataatataagccagagcgaagaaagcaatcaatacagctctgaaaatgaaatgatacaagatgaaccccaagatctttcattcaaatcttacaataataaatttggaattcaaaatattcaatatcaagatattggagaaaatgattctgctagtactagtgaatctgatgaagctgataatattgaagctcaaagtagcagcgaggaacaatctgaagggaatgaagaaattcaaatacggattagctctcctgaaaatgattctgccattgaaataaataacaactctgaagaatctcaagaagaatctgaagaagtagaagaatctgcagatgaaccagaaagtgaacaggaatcttcagaagaagctgaaaatcatgtttctgaaaacgattacacgtatgaaaagcaacctacagttccagaagaatctatttatcaaggattttttatggaacagaataatgatcaacaatctacaaatgacatacataatgaagaagaaccaattaccatcgattctgaatctgaagatattcccaatgcaaacaacgaagataattcacaatcaattgatgcctttgctgctgcatatgcatatgaattagcaaaactagctcaagatcaaagcaatattgataatattgaattaacttcaaacaagcccagcgatgaagatcacgacactgaccagatgtatgatggtgaaataccaatcaatgataatctcaaagaagatgcgtataacttgaataacattgaaaatttagcaaagatcaatcctgaatcattcgagaaagatgtgataatgtcagaagctgaaactaacccagccaatttagacacagaaaagaacgaatcaaatattgctggtaatgaaactgaatatatttatgtacatgaagatgaagaacctattattgatgaatctttgttccatacagcaattgaagattcagaaatccatgagtccactccagcagttgaaaatgaatcagagtttaaagatcaatacattttgtcttctcctcctccaaaatcaaacaaaaataacaatttcatacctataacaccaccacgcccattaacacctgaaccaccacaattattttcaggtttatctgctttacttaatgcttcattagaagtacattctaaacaaagctcaggtgaagttattgacagtgaactgtctgagaagttaaatcaattaaaagatgaagttattacagttactggtgatattgatgatgaagaactggaaagtattattacaaggccaacatcaaaggaagaaccagaagtgacctatcttattcctcaagagaacgataatgagacggaaattaacgaagaacataataataatgaagaacaagaagcacaagaaacacacgaagaacaagaagaacaagaagaaaaaactgagataatggtggtgaaaccatatacaaatgaagtggaaagttctaaagagaatacacctatctcagaactacaagcatctgaaagttttgccttatcggagtcatctgttttaggcttattgccatcctcaatagacgtcaataatgaaagtatcaacgaagaaaaatacataaattctttgatcaatgaaactatactggaacaagatgtcgatttagcacctcatccaagtggagtgtatggtgaagctcttgaaaaatcataccctgatttgagtaatgcagatcaatcattttatgttaatacagaagatcaattagaaacaagtgaattaaatagagagtcaagcgaagatgtcaatgaagaatcgaataaaatatctgatgaagagtctggtgaaattttagatgagaattcaaattcaacatttggtaattcaattgttgaagatgtagaaagtcaatcattaaaacgtccacacagtgaagttgaagccgaagagaatagtgaagaaggaaatgagtccattttcaagaggctcaaaggtgcattatcatctattaatccatttggaagatcattttctccaataaatgtgcctgaaattacaattgaaaataaagaagagaacattgaagatgatggagttgagaataatagtaatgatttagtggaagctgcacctgataatagtatgaatttgattgattccgaagctaatgaagttaaagaagtcgaggaagagaaatcacagtcagattctgaggaattcaaagttatatctgacgagattgctgataatgatttaagtgaaaatattaattatgataattcagcaataaatgaaaattctgataaagtaattaaagtgaataatgtgtccaaggaagaagtatcaagtgactcttttgctgttatagatgaaaatccatcacaaaattttttaaatgaaaatgattctgaaaacgtggaaaacgaaattgagattatgagtgtaaaagattcttcaacaatgaatgattcaaaatatgagcatcataatgttaacatgaatgaaacggcaatcgcagaagctattctcaacgaatttattaatggaaatgaggaagcaatcatttcccaccacaatgtttacaatacaactgtagaagaaattatgaataaatcagacaataatgaaactgtaggtgaaatcaaagaagaagaactttctgaaaatgaagccgaagatataatcaaaagtgcggagaataatgaagatgtgaatagaattattgctgaaaacaatgaaaatattgaacaagatagtattattgctgaagaattttctgaaaatgaagctgaaaaatttattgtggaggccaatgtaaatgaagaaactccatctggcagtaacattgaaaatgatattttgacagatgctcacccaacagatgctgctgaaacaattcatgatgctgatattaatattgaagtaaaatctgaagaaaacaatgaagaattgattgcaactgataataatgtcattgtgaaaaaaaccgaagagattgtacctgatgatgctgaagagattgaagagaatgaagaaattatgcctgatattgctgaagaaaccgaagagattgtaattgatgccgttgataatgtcgttcatactgtcgttgatactgtcgatggtaatgttgatgataatgttgataataatgttgatgataatgttgatgatactgtcgttgatactgtcgatggtaatgttgatgataatgttgatgataatgttgatgataatgttgatgataatgttgatgataatgttgatgataatgttgatgataatgttgatgataatgttgatgataatgttgatgataatgttgatgataatgttgatgataatgaatttatggttgataatgctattgttgtcgatgctaaagaattcgaatatattaccgaaaatttcaaccaaacttttgaaaccaaacctacagaaaataacaatatttcatttttgaagaaagtatttaacgctttatctgaattttcagaaggtgcaatgattgatccaacagaagatgaagaagaccaaaatgattatcaatccaatagtattgaatccgctaatttaagtaatgatttcgaacaaactaccaattcaaatgctgttgatgaagaagaaaatataaatatgaaagactcatttaatgatgaagtatctgtcgaatcaacaaatattcttgaagattcacttgatttatcaataaagcataatcaggttggtgaagaaaatgagggaggtgaagttttagctgatgaggaaataattgatgttgatcaagataaatctgaaggcttagaagctgactcagagaaaaaggaatcaattatagaagtattagaagagttgaatgaagtagatccaatttttgaaagtaataccgaaactgaagaaaagaaagattcactcgattctgaagaaagttatgaaaaagaagaaagcatcgaagaagcaattgaatctgatgatgaatcaaaaacaaatgatatactcggtgaagttgaggaagagaaagataaagaagataccatcaccaatgataatacaagtgatgatacaagtgttgattctagtgaatctttaacaaatgatatttcaaatactgaagatatggaatctgaaaaagtttcagtgattgaagttggtaaagatgataatacaagtctcaatgaattaatagatgattcaatttcaaccgaagaaaaggaaaataaagaagaagaagaagaagaagaagaagaagaagaagaagaagaagaagttgtaaccgaaagttctgttgtcagtaatgataagtatatatcaaaaggattattcagtattttcagtaacttgtttggaaagaagaaatcacacaaaaatgatacccctgttattgatttgaaggttgaaactgaaaacaatgatgaatctaatgaatccaatgaaaccatcaatacaagtgttttacacgttgaaggaacagctcgtcttgaagaaatggaaaattccactgataaagaagataaaaagcgtggtagaagtgcaagtacagaagaagaaattgaagtgatgaaagttgaagagagatcaccaaaacgtttacatactgaatctaaacttacggttccaccagttgctgttcgcaccagatcaagatcaccatcaaggaaagtatctgacggaaatcgtaccttgtcatttgaaggaagttctaaatccaatctgaaattgatggctaatagagttttatcatatggttcagatgatgatccagttgatattaatgaaaatcaacttccgagaaattacccagatttagttgaagaagccgataaatttattgaacaggataatgaaaagaaaattgttatgtctgctgatttcatgacaaatactgatgacgaaagtgaaaaaagttttgcagaagactcatcatttaaaaaatctacaattggaaaagaaataaatgttaaaaaaagaaatattagattaccttccacaaatagagtattaagaaaagattctgttcaaagatctgagtcaatatcactggattcaagttcagacaacgattcagacacagaaagttcagattcagatattgaagaagttgaagcaaataagacgaaggaagaagacatcacatttgcagaacgtcttggaagaaatctagatggaggaatcaaaaacaaatcaaccagaggcagaaaagcagcaagaggtggtatgttaggaagaggagctagaggccgtggtagaggtcgtggaagaggccgtggtcgtggtagaagaggtagaagaggttagtcctactttttagagtaaactgtttataatatatttacaagtgtaattttaatgtataatgttaaatctgataaattgaatcatatctacaaccactttaatattgctttgaagtcagacatttttaattataagtaaagatctaatatttaatatatttagtgtagttttgtaaacttgatttaacatttatcgtaagaggaagagaggaaatttgaatacgactatatacatatcaaattcagaagtcatcatcttcgtcatcttcaattttagttggtcgtcttacctctggttttttgtcttcaaattcatcatcgtcatcatcatcatcatcgtcatcgtcatcatcatgacctaaagtattatcgtattcattcttaataccttcattacctgatgattcacttacacgttttgcttcttcttcagcaactgcttcacatgcatcgatccaactagaatatatatctataggttcggataaggtatttattgcagtttggaatgattgtccacatatcttacaggttaaagtaccaatatttgtcttcttatcaattgtacaattaatagctttttcatgattacagaataaacatgtaaattgagtatctaatctttgttttaacttcttgacaggacctcttgaagaagtctttctcttacccatttttcaattgttgataggaaaccaaaaaaaagcttaaagtcggtcttatatattaacactgtaatcaccaaaaaatgttatgatgagaaatgttaataaaagaaaatggcagtttcctctttgggaatcttcacattatgaaaaattttttttattttaatttttcacttttatttactttaactagctttatcttttaaatttttgtttcatttttttatctcgttgaatttagttttagtagataagcaagtcataatgcctccaagaagatccaatagagttaaagcacaagaggaagttgttgaagttgttgaaatttctaatccttacactgaagaaaaaccagctaaaactacaaaagcaaaagcaaagactaccaaggctgctaaagctaaaaccactaaagctgcaactaatactaaaactaaagcttcaaagaaagcaaagaaagaagctgttgttgaagatcttacgaaagaagatgaaaatgaagatgttgaagaaactttagcttctacaattccatcaaatgctccaattgttcaagaaataaccatcaaagataccactattgaaaaagcagtatctgcattatccaaatggaataaagataaacaacaagaatcagataagaaagatctttttgaagaagaagatgatgatatcccattatatttaagtgttacctcaaataaatatttcactgatacatctgttttaaaaccacgtatgttatccctttcacatccaatttataatcttgaagactcacgcgtttgtttatttgttaaggatgatttatttgatgctgatgcaaaggataaacttgaatcattaaaggaatcaagtttaaagaatttagctgaaatagttactgttaaagaattgaaaactgtttacaaatcttatgaatcaagacgtagattactttcacaatatgatatatttttaaccgattcttcaattgctaatatgattccaaagcttttaggtaaagttttctttgattcaccaaaattcccattaactgtaaatataactgataaaaaagttttatcatttgaaaaattaattagaaattttgaaaaagcattacactctgttggtttcatgttaccaatgggtattaatgcaagtttcaagttaggtatgttaggacaagatattgaacacctcaaagaaaatattcatacaattgctaaatatttagaaaaattctctatacgattaattcaaattaaattaaaatcatctccatctcttccaatctatattaacaagaaaattttctctgatgctgatatcattgatgaaaagaataccgagagtaaagaaatagattcagaaattccattatctatctatgctgaaggtttgaaggaattgggtcttgatgaagaagaagctaatagacttttcggaggtaaaagacaatctactgctaccgaaacctctaacggtaagagattcaagaaaaactaaatttgttgataaatttatagaaactaaaatttccattcatcaacattttattaaatagaactttgtaattgaaataaaaaggagtaaattaacgtatcttatatcagattataacataactttcactggacacatacaattgttttgtttacttagttggtatctaactttcagcaactgcaagcaaccacattttcttttcctttcttttcatttaattttatcttactttttccttttatttcgttatcaaatacaaatccataacaaagtctggttctaatggagtttctctgttcaacaacaatctttcaaactcagcattaaatttaggaacagtatcatcaggaccaaattgtaattgagctatggaatagttattttgcctatttgaaactgcagtattattatactctttattaaataatttttcaaattcgttccagtttaaactattccccacattttcaaattataggtatctcttcatcacaattgttgaaccctagagtgtttcggaaaatatcctttttgattctaccgttatttgcaaagttgttgaaaagttcttgtttctttgcaaacgattgttgttcatgtcagaaaaattcaatttaggacatagttggttgtattcctttttgaactttattacttgttttcttttctaatcttttagggttcaggaaacatgtttatcatataaatgattacgtaatattataattcatgcttatttcaaacgatgaataatcgagtaggctgatattaccggcaacatcgatagtctttaaaagatttattgttaaccaaaaccatgcctgataagtatcattccaatacattaataattacagattcaacactactacatccacaaaacgaggacccattaaaagaaacattacaaacattaaagcgattcatcagtagtttagacataaaacataaattacatacatgtgttcaaatacttcatttacgatcactacgtcgaatcttattgatattttcaaataatagaataactgatttagttcatgaatacctacataaacttgagattaaagtaggatttgcaagaaatgataatactttaacatactgtgatatggatgatgccgataaccatttacacatggataaaattactgatgttaaaaaaactaataatattttaaacgctataaatgaaccagataattcaccagttaatgaaagataccccggtgaagaacaagattctaacaaaaattcaagactcaaagtaccaagtccggttattcaaatgcaatccccaccaccgtcaccatatgaaggttggatatatagacctgaagaagccccaagtgatataactataggatttcatccaaaaaagctgggccatattttatatactaaagcagatgaagatgaaatgagaaaagtattttcatcaactttggatagcgatatttatggcgataatgaaaagttggacaatttatatattggtgatggtttgggggatgaaagtaccgatgaagaaatatatggatcattgtttcaaaaaccaatacaaaaaatatcgaaaaaagaaacaaatacagggaaaaccatttctgaagttgatactaaacgtcgattgatggtccctattgtggttgttgatcatttggaagctgaaaatcttagagaacaagctaagcaattcgattacggaaactaagctagaaaagattatatttttttaaaaaagaaaaatagtgtataaaataatgtacaaataatagaatgatttagtgaaattattgaaaatgattgtaaaattttaaatttccaagtaaaactgcagctgtaaaaaatagcaaaatgataatgtagaagataatgtaaggtttagaaatactaacaccatacgaataaatactcaaaaatatcaatggtgcaatcaaattcaatatatttctgattaacgcaagggcaccaaaaaattcaccatttttcccagggttagtattatattttagtaaagttgaatgaatcacaggagatccaattgacgaaattgatgccaatacaacataaacaataacaccaaagaatgaagttgagaatgaaacaaagaaagcagcaaccagttcacacacaattgatatcataatagttgtaacatcaataaaatcaacattaattggatcgtagttaaataattcgagtaaaaagtgttgtaaccacggattaaacactgttaaagcaaatgatctaaaaccggctgcaaatccaacaaacaaaccaagttgtgattgtgacatattaaattgatatattagataaagagcaacgggtaatgtagaaccaacggaacaaaagttaactaagatttcaatagctaataataaacatccattgatacgagcagacatatcaatttgatcagttggctcattctcactttctaataaggatttcaaattatcatttgttcttgaaagagagaaacgtttcttggccaatggtttcggtgttgaagatacattattagactgtgaatttgatgaatttggcatattcatagatacggctttggagcttccagtttctgttggattaaaatctagaggtctagttacccataataatttcaaagagctaaatgaatcaatataatgatgtaaacctagtttatatgtccaagattgattagattcaagttctctctgtgatctaactgaaaatctacgacttttatttctcaatttaacactccttgattcaggtaaaatgaaaagaacaaagaaaaatgataagaatatcaatacaaaactagtcatcatcaaataaatagagcgaaccttaaatgtgattgaaacaattgatgaaacaaatggacctaatgataaacctaaaaataaagcaccagttattgttcccaatgactttaatctttccttttcatgaataacatcaattgtataagaattggcaacccctaataaaacaaacattgaaccacccattgcgtctaatatagaataagcaaatacaccgggatatgtaaaatattttggagttaaaacaaagacagataatagtctagataatgcagtcatgaagaaagtgaataaaatcattatttttcgtccatgtatatcacttaatttaccaactttagttgatacaatgattttgattattgaagaagcaaagttaatccatttctgtaattgtgcattattttgttgaacttcattagatgaacaattatctagatttccatttgtaacatagcaaacaccggttaaaatcattgttagctctgaagacattgcaacacctactgagaaggaaaataaaaacagaacgaaggataatagtaaaacagaaggtcttttatgccatgcaagaaacttataagtgtctctttcttccagtaacaatgcagaatcactctcttcactaaagattgaaccattatcattcaaagttaacggacctacacctaatttatttaggttacctgtagataagattcttgaaccaccatcattattagtgatgttatttgaagtattgatattactgaaaaaattaatgttattatcatttaactcatcatcactattaatatcatcaccttcatcaccagtttgagatgcataactactatttgaattactgttaaatctatcatcttcaatttctgcatcataacctcctccacttgatgataataaagccgcttcttcaattatatcatcatttatagtagcatataagtatgaattacctcttgataccttaatatggtttgtaccacctaaagaatgtttgttattactatttttattactatttttatggctatatctttggtcgggagtggatccataatgaagatcagaatgcattgtatcaacagaggagcctaaaagaggagcttcagcgggcacagggccagcctttgcctttctacttctcctataattcttcttagccatgtataatatgtaagataggatattccaccagacagaaccaaccccccagtataactattaataatcaaataatcattaaatcctgtatctccacaattgcaggtggcagtgcactaaaaaattaaaaaaattattgaaaggcaccccgtcctaaattaggcaaagaaggcgaaacactgcttattttctcaaattgccataggaagtgaaaaaaaaataataattttattttatggtgatgatgatattattattgaatttacgtagcactacagtgctcagctgctttagacacaggtggcaacatcatatatattatactgtattactttcatatagcacataattcaacattgtgctctcaaattcatgtcgaaggcaaatatagacacttccaatggggtatcggaataccagaacccttcaactaaaggttctgaaaatcccttatcggcaaaagtattggctacagttataagtactaaaaattattataatacagattccatatcaaatacacttcaattaatggaggatgatttgatttatgtgttagataaacctaactcttattggtgggatggaataatgattgaccccgtgggaaatattacaagaggttggttcccagcttctcatacaaaaccttacactaaaaatgataacaataataacattagcaagaaacattcatgtcattcaccaatatttcataatgaaaagaatactgtaaatgaatttgaaaaatctaataatccaaggaaaatgagtataatgagtactgatagtaatattatacaagaagactccatgaatcatttagataaaatacctccaaaacattacaataataataataataatataaacacaacaacaaatacaaatacaaataaggatgtatcaaattcaactccactagctacaaatataacacactctccaagtatatcacttcataaagctaaaagattatcgctgaaaccaaaacatcctcatcacttacaataccaaaatcattcccaatactatatttcaaaagtcccttcttcaaaatctatctctgatattcataatatgatgcatcaatctacggtatctactttaaaacacgaaccttataatataaaccatcatcatagagatgatccacattccaattctcattcattgtcatcttcagcacactcaattttcaaagagaaaaactattttgtcactaagcaagagtcattcagttcagctaattctaatcaatatgactctagacaatcatctcaagcattcacagaaagtttatctaatccaattcctaattgttttgtttcaaatgatgaagttaactcatattttcaaccttcaaaatctgaattacaaccatccttcaattttataccagtttggatacctcaatttgatcaaaattacaatacagtctatgagaataaagctttaaatgtatgtacagatgaaatcccatttatagatagtgggtatatcaatgagaaaacattatatgaatctcctgatacttctaatttaataaaggatattaaacaattgtctttcaatttacagggtagaaaaaattctgaagtctcaagtataaatctgagttcaaaacagaactctgaaggaataaattccaacatcaataatagtaattttaatagtcatagctcatcaacaaataccaatagtaatttaccttcaaaaattcaatctatttcagattcaacttcaagtaataatatgaaatcaaatcaaaactattttaatacaatgtacaatttaccaacatttgttgattcaaggccaactgaaatcttttatacccacaataccgatattttatcatatgatacttttaactcatctttcataaacttaattgataaatgcatttcccatttaaaaaatcatgataagttgaattataatttggtcatgaataatacagcaacatttttctcattatatcatcttctgggaagattgatacgtcaaaaattaattgatgataatcaattgagaaaattcagtattattttgaaaaaaattacaaaaatgtttattcaatttaaaatttgggcttcattatcagttatcacaattgataaaattgaactttttgaaagaaacctcactgaaacattaaatatcataccatcagacaatataggtgcagattttaaacaaaattcaaaaaaagatgtttctgatagtaaaaatgaattggaaattcaaaatgatgatgttatcaccgataaaaatctcaattatcataatcaattagttgaaagttatattgaagatttgataagaattagaaataaaattgaaaaactatctcttcatttaagtactgtactatccaaattaaatttgagtcctttgaatgattcatatcaacctaataattcgaaattactgccaatgttatatccgagattcattaaaaataaatttgaagcaggtaattttaagaataagtttgttgatctaagaaccacacaaaatgatttcttcatcaatccacaacaaaaagtttcaaatatcttattggatgagaatgcaatttcgaaattagaaacattagaaaagaaaattcatgtatctcttgcaagttttaatgaaattttatcaatgaaattagataatgatgcaagtttaagtgtttttcttgaggagaagaatttgaagttgcttacagctgtttatcaagcaataccattactttcagcatttgttgatttagttgaatctattgatttgactgtttttgcaatgattgataaattagcagttaaacatattgaaactgaaagaaatgatacaattgtaagtaaattggatagtacttatggtaatgaatctacaacttcaattgacccaaattctgcaaatgttactaatagtacttttgagcaaagtaaagatgaaacttttagtgattctcctatgatttcagaaactgatagatttaccgaagtgagcgatgaaaatgagaatagtcaatcattttatgatgcaactgctaaagttttcagacctatgatccaagattttattcatttaaaacagtcaattcattctgtctttactgatttaattcttgatgcgcaaacaattactgctattgaccccgaatctttcttttcaatcaaagatgacaataatatgagtataagtcattcaaatctcaaaatattgacagaatcattaaataataacccatctgatagagttaaaattgttgctgatgttatgttgaaaagatttgagaacttggataaaaatagtcttaacgatggagttttcagtattgagccttcattgaaattattagaaactatcaagcttacaaagaatagaatcaaattggttgtcatgtccatatcacaattaaaggaagaaagaagattaatattaaactattgtacaagattaatgaataccgattttaacgttgcttcattgttcattgctgaaagacataatactctaacacccaaaataggtgatcaatcacaaaattataataataagtccgtttctactgcacgttcagtaagtaatgaaatatatggtgaacacattgatttgaacaatgattattcaaacctgccaacaaatgaattaaataattatttcaacggtggtagtattgattcagctgttgaaaatatgaatgataatttattggaagctaatatctatagtaattatccgtggtatattgggcctgatcataatgaacaaaaattaatttttgaaggtacagttttaagaggtggtccaataaagggattaatagctaaacttatcaatccactgaatccatatgatcaactatatgaggaaacatttttatgcttttttgcaacatttatcaaacctattaagctatttgaaactttgattgataaatattatacaaatatgccagaagcattaagttatgaagaatatggtatttggttagaacaaaaattaaaaccacaacaaagaaaagttttggaaatttttgaaaaattatttgctaaattttggatggttgcttatacaagtgccgaactaattaatacttgggaaatatttcttgatgatttaccatcagttgatgagtccttgattgaattgtcaagtaaagtactgtcattcactactcaacaagaatatattgattttattgaaggtgataataaaaaagtaaaatcactaccaatttcacaattaaataataatatattacatttgaaattacaatcactggatattagctatgttgcagagcaaattactgcaatgcaatcattttattaccaacaactgaatttatgggatttgctcggtagatcatataattataataggatatttaagaaaaaaagtgaaaaaattaataatttgagagatcctttaggtacaaagaacgttgcaaattttattaaaaattgtaataatttaacacattatacaacatttatgattttgaaaaattcgtcacttgagaagagagttgaagcaattaaatactttattgcactagctgaacaattattaagaatgaaaaatttctcatcaatgacggcaattattagtggtttgggatcaacgagtatttcaagattgaaaaagacatgggatttagtcccaaataattttgtagcaaaactggaaaaaatggataacctaatgtcaattggtaaaaattatagtgaatataggaatattttgaaatttgttgagactgatggtgatgcatatttaccatttttaggtatgtatttatcagatttaagatttactacagatggtaatccagactggttaggaaacaagaaaggttccaagggtattgttaattttagtaaaagaattagcattatgaaaattatcaaagaagttgtaagttataataataatctgcatgatattaaacttgatccagaattctcaagatacatgcatgaaatgtttaaagaattacctgatgatgaaaaactttatgaattatcaattgaaattgaaccaagagttagtttattgaaaaatacaaataatgcacatgaaggtacacaaaagagtgtttcatctatcaatacggttgatttaaataatatatttggtggttacgcaggttcgatagctacggccagtagttctaaaactggtaatgatgataaaaaggatcgaacatgacttatctgtgaggacagataagataaatctacattttttgacttttatattataattatctgtaatgtaattatcaacttatataacataataaaatggtgagggactataaattaaacatttataactgatctatacataattgggaaagttctgatcttaattctttagcggttttaatagcttctttgaaggaaataagtaaatcatcttcattaactccatcattatcattgttattattattatcttcatacttgggtatgtaaaatgtaagtaaatcttcattatttaaatcatcgtcattatttgaactgtaagttgatgaatgaattgaattgacaaaaatatttttagaagatacagcagcagcaggaaaatttttaatggcaatacctgaatctactaatgctaaatttacagcattatggattaatggtaataattcaataaatttagttttattatcagtattaattaaattaacaaatatatcaattgaggattttggataattatcgagtatgattaaattgttacatgcagtttctaaagtagataatatgattgaatcggatattagatactctggatcgaccactatattttcacttactttatttaaactaaaattgttcattgattgacgagttaataaaaatggagatgaatggaaagtaattttaacaacagcttttgaattgaatgcttttttaaaagatggacgtggaccatagactgatgcaagtaaaatattattacctgattggatgaatgaagatcctgtagctgttggtatatttgaaagttgtgcaaataatttattatctgttactatactttttttttcagttatttcacaaggaggaaaataaagaggtgttgcatttgatggacctgttcttctccttctatctatacctgttgacatgatgattttgtgctgtctcaatgaaaaacaaatgatgataaactgttacaaaaatacaaattacaaaaaaaaatttgttcaaccacactatgaatcaaaaatcatgttgaaatttcatactcagtgtgtcagttcgttacttttccctctttctatagtatactaaatcttctcttttataccaacaaacgacaatggactttgattggaataatatagtatcacagaaagacaagattgtcgatattattcaaaatgatctggatggtactactgttgcactggctgttggtggggttctggcaacttttttcttagcatcaactatttttggatcaaaaacaagtaaatctgatagaccaaaaccagttaaggtaaagcaagaaaagactactactgttgatcctgtgaaagaaggtaatagaatcattaaagaagttataaatgaattaaaggaagttattatacctgaaattgagagacttgaagcagatattaaaattgaacaagagggtggccaattagaagataattcatacaaaaataaaacaaaatatcgttacctttatttaaatgaaattttcttaaaaatgcttgtccgtctggatagcattgacccacatacatttggtgataatgtaagtgatgaagtaaaatcaaagatccgtgaaaagagaaaaactgctgttaaagctgtcagtattcaagataaaagacttcaaaaactcagagatttagttatctaattgattttatatatctaatacccaatgcttatattgcatatattcatcatagttacataggattatatagtttatctttattatagaattgtgcttcattaactttatcctttggtcggcttcctccatcgatttaatgggaccaattagtttacccaccaacttagtgggccaaaaaattacgtaataagaattgaaattttccatgaatttaataaattttatcaaaggaaaaaataatttcagattttttttttacttgaatatttttatcttttgaagtatataagtcttttattagagtagcaagacactgtcttaattaccaggtagaacagtcaattatgaaggagaacaccttgtttaaactagatttattagaatctttttatttgcaaaaaccttctaggtttggtgtaactaaacaaatgatgagatctgaaaaatatcaatcaaaagcaaagaaagcattatctcaaactcgtttagaaaaacaaagacataaacttttaacattgagtagaaacgatgcatttgatttaatcaagaaacttaaagatgaagcatttcataaaaaaatatttttcattgaaacttcattacttagatgtataactaaagtgttgaaaaaggaaaaacaaaaattatctcaaaaattatctcaatcttccaaattagaggagaaaaaagttgcttcaattaataaacaaatagaagatcttgaaaaattactttctaaagaacactctgaaatattatcagttaatataaaacataaaatttataaatcattaataaaattgttcccaaaaaagattgatttaaagactgaaacatttgatagtataccagaagatgaaattgaattcatcaagaacatgaaagaaacaaatccttataaaactaatggtgatgttattaataacattttatccaagatatatgcagataaatcagttaaagaagcacttgataatattcaatcatttgaaattatttggggaccgaagaaatacactaaagaatccaatgatgaagaactcgatgaatttgatgaagaagttgaaaatgatgatagtgaaagtgaaaatgagggtgaagatggggatgaagatgacaactctactaaaccacttgcagacgaagattacgaagagttgtatactgattataaagattacatagcagcatcatcagatgaagaaggtgatgaaattgatgtgccaaaacttgatcctaatgtcaattacaatgaaatcactgatgatgaaccaagtgaggatgaagaagataatgatgataatgaagtttcaaactctgatggagaagtatctgaaaagactgataacaagagatcaatcgaagaagatgatttctttgcttctgaacctacaaccaagaaatccaaaaaggaagagaaaaaggagaagaaaagttccaaaatacagcttcctgtacttgcaactggttattattcaggtggtgaaagtgatgatgaagataatagaaaagattcattagttgatgaaattactaatccacgtaaaaatcgtcgtggtcaacgagctagacaaaagatttgggaaaagaaatatggtaaaactgctaaacatgttgttaaacaacatgaaagagatttatctgaaagagagagattaaaggcagaatatgaagttcgtaaagcaaagagagaacaaaaggaaattgaccgtcaaagacgtgatgctgaaagattggaaaagaaacaaaaaatgcaagaaaagactatccatccatcgtgggaagccaaattaaagcaacaagaatctttgaaggctaaattctctggtaagaagattacatttgactgattaatttaatcagtagttttgtatagattgtatagaaaatatagtaaccaaatgttaaacaataaaaacattaacaaacaggattcgaaatgagaacaagcatgtcagaaattttttttttttcaagttcattgcagatcgatttgattgaaagctttgaatttatttcagaatgaaactaattattttctttttgtttatctaaaatcaaggtgaatgaatattcataggatattcaatcacagaaaattttgtttatcaacttttagaaatatatcaatatttaaaacacagtcatataaaaagatggaaaattcatttactaaaaggtatattcctggtgtaattcccgaaattgaacttacaccaacagagagtcaaattattaatgttttaaacaattatacaactgcatataactctactcttgaaagtgaacaaagtccgataactttaagaattactggaggttgggttcgtgataaattattaggattaccaagtcatgatattgatattggaattgataattgttcaggtgaatcgtttgttatgggattaaaggaatggttagaagaagaaaagaagggtactgacgaaacaattaataaaatacataaaattaaaaaaaatcctgataaatctaaacatttagagacatgtacaacaaagttatttggtttagatattgattttgttaatttaagatcagaatcatatactgataattccagaattccaacaataagtacaggtacaccatatgaagattctcataggcgtgatgcaacattaaatgcattattttttaatttattaactaagaaaattgaagatttaactaataaaggtttggaagatttagcaaatggtgttttacgtactccattagatccaatgaaaacttttctagatgatccattaagatgtttaagattgataagatttgcaagtaattatggatttgctattgatcaattagcaattgaagctatgaagcaaagcgaaattaaagttgcattggaaactaaaataagtagagaaagaattggtgttgaagttaagaaaatgataattaataaaagaggaattattggtgtcaatgatagtattgaactgttgaaagaggttggattttcatgtgtatttgatgttggtgatagtaaagttggtgatgaatggattaaggaaaatgataaattattgaatgaagatataatgaagaattttgataacattaataaatatttgattccaattgtagaatctaagataattaactttaagggatttttgaatgaagaatgtgatgaaaatgatagagttttattctacagctgtttaatattgaatacatggagagacaagatgataaagataggtaaaaaagatttttatgtatcatatctatgtgaattgaatggtatcaaaatgcctgcaaaaatatcagagaatgtttcaaatattgttaagaatatagaaaatgtcagaaatgatattaagaatgtatcaaacttcaaaagaagtgaaattgcattaaagtttatattaccattcaatgataaatggggatataatttaattatcaattgttgtttggaaatatttgagaatgaaggtagtgaaatgatttccatcatagaaaaatataaggacgtcttcaatataatatacgaattaaagctagagaattcatacaatgaatctattttgttaaatggtaaagaattaatgaaaattattaatagaaagccagggccatggctaaagccattaaatgataagttatttttatggcaactggataatcctggtaagaataaggaggatatgattgaatatttaagttcaattgaaattaactaaattaataaggattacattgaattgaattattaagttagaaatagataaatattatttaatatataagtatgtatggataagaatatatagaaataaacttagatcttagtttcattaacaccgtgtttccaaacagcaacgaaaggagtttcaccatcttctctatagttcattaaaacaatcattccatcagggtccattgattcaccagtgaagaattcccaatctttgaaagaaccgataacttttttaacataagcagcagcacctttttcgaaaactggaattgcatcagggtcagattcagctaatttagccttaattgatttcatgtaacttttaatataagttaagaaagattttttatcaaaagcggtttgttgaagtctgaaagagtaaacaacattgttaacggtttcagcaccatcttcaacatcatcatcaccatcttcagcagatgggttagcaccaatatcgacatcagcacctggtctaacagtaaccatttgacagtcagcttcgtaaacgacatcatcaactaatttgacgtcataagcatcagataataattcatcgccggagaatttgtcagtgaaaataatcatttcaatataataagattgaactgtttaattgaaggaaatcaaaagagactcaaagatacaaattaaaagtaaaataataattctgatgaaaactggaaaaccaaattaaaaataccagacagcacatgccatgcagcaaaatttttcatttttccaaattttccatttttcgggaaattttttttttctcaaaagaagtttttttttctagtgaattttctgcgtcgctgcgtcggcctgtgttgttacgtaatgttatacatgattagcttcttttacaatagttaatacgtcttctgctatctcctctctgcttgtttctggtatagaatatccttcacccaccttaactgactcccctattgcagtgtctgctacaaatcctggaagaagaacgtgtatacctgtttgagacatctgttcagcaacccctcctgatttacgttttcccatatattctaattctttccttattgattcagtaaatcttaccaatgctgcctttgatgtggtgtaaatacttgcacctatcaaatcattatgtttatcacttttagcaacaatacttgctatattaattaaaataaatggatgtgtaatatccttcattcgtattgcattctttatgaataacttacttaatacaattggtgatgttagattaactgatattatatcattaatttcattacttgcagtactcattaataaatttttctgagttttacctgcacaattgactaaaatgttaacatccttgaactggttccagtatttctctcttatcgattcttcaattttattggaggttgttaagttgtatgcaatatagtcatgttttctctcttcgtttattggatatttttcattaagttcttggactcttgatttaagtaaattctcattttgtgataaaatcgtgactcttattccatttttggctaatgtatctgcaattgtagcacctatacctctactaccacctgtaattaaagcatgttgtttgctaattgatctgaacattattacatacaaaaacaattttaattttaacatgaaatcaaaaccaacttgatcgcaaaaaaaataaaatattacccttttgggaaattttaaaatatttacatgtcctattaatctttattattaatttctataaacgattataaaatacaatgtctatacagacttatttcttatgattatacaattgttctctaaactaacttccctattaacatatctaacaagactaacttcaaatcctttcttttccattgcatattttcttgattcgtcaagaatacgtctcattttcaatcctataacttctctctctttgaatgataacccgctgaaatgtgtatctttaccatcattcacatccattccaggcattacaccattagttgcccatgcaaacatctttttaaaataaataaagtttgtttcatttataccaaatttttcatttaaaaattctttagattctttcaacaaccattcatatttacaacagtgtctacaacacatagcaactaaacatccaccaaattctatatcatcactctcacacttatcatgaattgcattttcaatacatctcaaagttaaatcagttgcgacaccacagagatgtttagaaataccaataaatttactagaatcaacatccttatttaattcttttaatgattctattaatttcaaatctttaatatcaacttttaatctctctgtagtattttcacacaattcgatatctttgacaatcttattatcaaattttaaccttggattatctctatccactaataaatatttgattttcttgaaatcatctaaatatgttcccatagctctatttaaatatcttgcaaattctgcacgcccacatccaaattcaattataatattaggatttttaattgattcctttttggataaaagttcatgatttattaattgtccaattaaactactttgttgctttatatgtttttgattactaacttcagcaaatctttcctctaatccatcaacaaattcaatctcattcaacactaattccatttcattactgaatatttcatcgtgtttttcaccccacttttgaatattcttattccatttatcattatcaatttctttaatttcacttggactattaatagtgtctataacattataatcaatcttaaaccaatcaacagttttctctctttcctcaatttcaagcttcttttttaatacattacaaactttaacgtgtagtttcaatttatcttcccaaactgtatgacttggatcaatagtacatggtactctcttaataacttctccattctttttagttttagtaattccatcatcatttccctccttattatcttctccgtttgctaatttaatgtgtgcaaaacaaaatttctgccctttacggacttgtaaaccacattgcttaccattttttggttttataaaattacatttgaacaattctggtttgtttaaatttgtttcatttttactggtagattcagtaactttttgtcttttcttatcatttgtatctgttgtcattatacagaaagattggtatgaccaacttgttattggatatgagggtgtatatatcagctaaaataaacctttagtaaactacaagaaaactgatcttgaaaaaaaagtaaaaatttgagttaattttgacaagccttctcaaagttgatattaaaaggttaatctactcaaacatgtaagagtttataaaaagcgttaataattagatttactccagttttattataaataaccagtacttttcatttcaaaataatattatttataattgatgtttgaaaactatatatgcaaaaagttgtaaaattgaaggaatgaaaataataaataataaataataaataaaacataagacataaaacataaaaacaataatgtaaaattaattgaacgtaaaactgataatttcaatggttactgtgttttcttatatgtatatcaatgattatttcttttcaattgaattttctaaagttctgatatgagtttccatatttctaatagtcttttgtaataataaaatatcagaaataattgcattagatgaagttttatattcatctaataaataatagtaacaaccaaaacctgtaagtgaaacaccagcaaagaatccaaataagacaccctttaatgaacttggttttggtgatgcaaaagttgatgccattcttttgttcatgacaatttgagtacttcttttagttaattgtgcaaacattgttacttgtatacctgataaccttgattagccgtaatagaagtgacacaagtcctcaaaccctatttcaaattgtaatcccctctccaagagtctttcattcttcgatgtataaaattgagaaatttgaaatctcatgaggtcgctaatgttacccaattgggtagtattcagataactattacgtacattgaagttattaagttcctacagttatattacatttcaatagagaagtaagtaaagaaaactaaactataagatgtataaatgtattataaaaagaatatttaaataatttaatctatagaaagcacgtttaatcgaataaaccgaaacccatgtcatcatcttcagattcttcatcttcttctggtgcagcttcttcagcagcagcagatgaggatgcagcagcagctggagcagcagcagcataagcttctgggttagcaattctgtccttaatttgttcagaaccttcaaaagtgtaatcagttgcaacggataaagcaaggatgttcttgtaggtgttgacaatttggtgagaaactgcagcaacagttgggtaaccagatgctaaagagatttgagtgattgcagaaacagcagaggtgaagtgacctaataattcatcatcagtaatatctaagatagtagctgggaataagttaccttcgttgaaaacttgtaaaatagttaaaccataagtgaatggagaaatgtttaacatgtttaataaggaagcttcagaaggaccaactttttgatctgcagataaaattttaacatcagcagtaatttcaatggtacctctagcaatcttggttggaacacctaaagcttggaagaaagaagtcttacctggttccataccagtgttacctgctggaacgtaaacatcagctggtgcaatagcacctgctcttgctggagcagcaaccttgttatctaagataacatccttaacagtctttaaatctgcattggtgaaaatgaaaccaatgttacctttaacaattggcattaatttttcatattctgggaattcagaaatgaaacctctcatagctcttctaaccatggtgttcttacccattaagataacagcatcttctcttaaagtctttctgacttcgtgcatttgttgggatgaaacattatcaacaccaacaatgaagacggatttgtattcttcaactaattgtcttaattttgcgaaatattgttctttcttttctctggtagctcccatttcgtttgtatatacgttaggctgtttaaagctgcttattaaataaaaggaaaatcaagccaaaatcttcaaaatgtgtgaaaattcaacttctctacggtgaaagctctctctaattcttacttcgctaagtattttttttcatagtgagaaattgaaaaaagtttttgcgcgtgtaataaagtctagattgggaaattagggttggaatagaatttttgaaccttttaaaccctatttcccttttgggacaactacatgattatccttatcttagcttaggttattataacttaaagctgaattactactatatgcacatgcagaattgtctataaaaaaaagtaactatattctagaaacctaaacttaaactattattgacgttataactatttttgacttttcgataattcatcaatcattaaagtcattgtatcaacagcccattcaattctggaacgttgtttcttaccctggattaaattactcttcaatatcttatcattaaggaaatattgtaaaccttttaataaaagtggttgttcctcacatttggctaatctatcagaaagtactttacctgtgtattctatatttttagaacttttaactgaatcattatttgtttgtgattttttagcaattgtatctaaaattgtaatcaacataatttccaaaaatattttaacatcagatgaagctgtaagaaaattaataacccttaataaatttaatgataatgatccttcaccaatcaagaaaccaaaaaatctacccatattcaaaatcttccataatctttcctcatcattggtatcaattaatatagttgttgttccactatcatcaccgtctaactctttaatgaaatcccataaattcaattggaatgatcttctcattgcatgatcatcacataattttttagcaaggtgtgaataatatggattgttattagcttccattgtagcacaatgcattaaaatatttggaatctctgctttttgtgatttctttaaatttaatttttcaagtttagcaaatgaatccatgaaatcttcagctgacataattgaaatgaaaatagctcttctgatatcagtattcattctacattgtttagctaattctaaccaattaacttctgaactaccagatagttcatcttcattattaattaacttttcattgacattagataaatcattaatatcttgttcgttcaaactcttcatttccttattatcagatttattatctaaacctttccatgctgaaccaactaaccaccatttacctctctcttcaatattttcaatatcatcaagattaactttaatagggtccaaacctctaccattattaatagaacctaattgcttcttaattctgttaatcatttgtaatgtattttcattttcaagattctttaatctattatttttcaaatcagtaattgtatcaattaaaaacctacttctggttgatgttttgatacctctattttcattttgtttgaccgatgtagtcaactcagcaataattgaatttaatgctgtagaatcatcagatcttaatttagaaccacatgaacgaattaattttaataaaatatcagtttttaattcatttgaatctttgataagtttcattttgattatatcatagaccaaagttgaactaactaaatttaatgtgtaaagataacctaaaagacctgtaatattcaataattcttgtttagttctagaatttgtttcaatttctttctcaaattcttcaacaagcttttgaatcatgaaagcaccaaattcaacaccttgtaatttgtataatgcaacaatagcactagcatataaaaccaaaaaactttctaacattggagttgaaattgaaactgattgaagtataacttttaaaattgcttcattgacaaaatgtcttggattatcgttataaatattgttcaaatctgatataacactattcatatttggttcagataacttattgaatggacctttgataagtcttacaagtttttgaacagtttcagaatcaccgttcaattcacccattgccatcttccttctcaatgctggaggtatatatttagatcctgcaggtgcagcatcctctgtgactgaattaggatcaacaggtgccatataaggattttctttcactcttggaccatcattgtcatctgaatcgaattctgaatcatcttcggaatcagaactttctaaaccgtacatttctctcaaaagtgccttgtcgtcttcatctaaatcatcatcattgtcaaaatcatctgaatcaacttcatcatcaccatttttagatcttccatcttttgattttctatcatcatcttcttctgattgtgattcatcttcagcttcataatcgttactttcatgttcatcagaaatatcaaaatccaaaccatctaatagatcaccaattatatcatcatcatcttgttttttaaggccttttttaggatcaatacctaactttttagcataatagttaatctcttcttcatcttgttttaataattcaagatctttttcagaaagattcctcttaatattggactttttctccttggttttatccttggtattttcttggattttcactttcttggctctgatttctgattcatcatcggaggcaaaatcattatatttatccataaagtcaagaccttctaataacccgccaaccatatcatcatcatcttgacgagataaacctttctttgatgaaagtcctaatttctttgcgtaatatgccatatcatcatcatcttgtgaaacaaaattaggttcatcatattcttcctcagattcatcttttcgatcatcatcttcggattccatatcttcagaaatactatcatcatctaactcgtcttctttaacaatttttatgtttaatggactctttgattttttaacctttaaagcagctaattgtttcatgattgcatcttgttcctcgtctagttctgcagtttctgattctaagtctaaatctgatgtaagttcgtcttgttcttcttcatcttcattaccatcttcggataaactatcatcatcaatttcatcttctttcactatttttaatgaagatttttttaaagatttattacccttaagtgcagctaattgtttcataatagattcttgttcctcatccaattcctctttttcttcgttttcttcttcttcgttctctgaaccactgaaatcagacatactatcatcatctaaatcatcttctttaacaatcttaagaggtgtagatttgtttttctttttatttttgagagctgctaattggttcataactgcagactgttcttcatcaagctcttcctcttcttctaattcttcagatccagagttagattccgattcttctgacatactatcatcaactagatcatcttctttaacgattttcaattcacttaatttagatttctttccttttaatgctgctaattgattcataacttcgatttgttcatcatctaattcctcggcatcatcatcgtttttcaaaccatgggcatcacgttgaacttgttttaattgttttaaagtatttattaattcagatgcatctttttcatcttgaaaatcaagttcatcatcacttagattatcggtatcatttaattcatcactatataaatcactatcagtatcatcatcattatcgtcattattattagttaaatgatttacatttatatcagaatctaacatattgagtaaagtttctctattgggtatttctcttatttgatcatgatcactaaatgatactctctttttattctttttcgaatctttatcgttattctttttagaactttcaaccttattattaaagttagatttattactattaggctttttagatttaacattttttttattattttcaaattgtttcttcaattcattggtaagtttcttcttttcacttttcttttccattctttgtctttttctgttttctttacgatgtataacagatgggccttgaagtttagcacgttttgtaaatctttcatcattttcataggatccttcattatctctaatagaatccaacattactccaggcatggagatagcatgtctttttttgctatgatttctggacatagtttattgtttttgattattgactataacttactaacctgtatgtcactatgactctatatatatcaagcaaaaaatttattgtaaagaaaacttctttcagctaaacgtctttttttttcttacttttcgtaataggaaaaaagacaacaataaaaatgaaaaaaaaatatttttttaaatgttgccatactaaaatcctagataatttacatgttgtattattactattattattatgaaggtcaatatttcaatgtattggtttttataacggacctgatctttgaattggatctttccagtaattatatttgtcttttctatttgtttgtagataaagccaatgatgcagcagaatagctctccttggaaatctttcaccggctccattttcaataagacaccagagaaacaactgaatgatggtctatcaattaatggatcaccgttacctaatactttcaaatttaccccaagtaagggtaaaaagttgtatccacatttaaatccacctgattcactttcaatttcatcaagcttgaattctagtcctgttcataatattgatcaaaatgaaagttatattaataaagataatcaatcatttattaatgcaatggactcattacaatcacaaatgttttcatctaatatatcgaataaagttatgaatgaattcagttcaagatatgaaaaggtaagagaggagaaaatcaatgtaatgcatgaattaaatatgaatacaactaatgaagaattgaatcgtagagcctctggtaggtttgcatcaactcatagaaatagattcaatagaatggagtcaattgcatttcattatacttccaaaagattaaaggagaaggaaattgaagaacaaaaggaaaaaattaaagaaagtaagaagaaggctgaccaacaaagattattggttgttccacgagatatcgcaaatgttgatgagcttactattgacgataaacccgatatggtatattctacaccaggttataaaagaaatgatttcaaaaaattagaaagtgcaacgaagagaataaaattacctgattctacatataaagaaattgattcaagtcccactaaatctaattttgaaagagaagaacttaagtcaatgcatcaaaatagaaatataccaacctatttacaaccaacaaaggcatcattaagtaaatcaacatcaagatcttcattaaatatcaatttgaatcaaccaattttagcaccgaaccaaccgaaatctataagtcaatcaccatcaatttcacctactcgtggtctttcaagaggtaatggattatctaaaatttcaccatcaaaagcatattcaaatctcaatcaaatacttacatcatcacctgaaaaattaccatcacctgaaaagtcaactaatcgtaatcaatcaacaacaataaatacaacaaatacattacgagctaaaacaacacaattaccacgaagtaaaactacaaatatttcaacaattgatagtagtaagacattacctaatagtgtgagtgcacgatcgtttactacttcatcatcaattccaagattagccagtttggttaatgctgaaagtcgaattaaaaatgaatcgaagaatgaactaaatgtcaaaaaatggagatactaaaatttcttttttaattcatattccttgttttgtataatatattttgtaacaaatattctagaaaataaaaaaactaaaagctagttaaatcatcataaaaacactaaaaaagttttgatctattctttaattcaactaaactaatacagatttgttcctaaattataacgaaatcgtccaagctgggactcgaacccagaatcttcagtttaggagactaacgcgttcaccattacgctacgtggacaataattcgcttctacttcaattgaaaatttctgaaaagaaaattcgaagtgggtactttaatcctcttattttaattgaactatttgagataaaaacacaaaaaaaggggtgctctgccaactcggaatggtgttttcacgtgacacccagattttaaaaagcatttttaacagccatgtagcaaggattctatgctacaaagctatttaatatacacttcaaaacccttctttctttaaaagatattttaaagccaaaaaaggcttaaaaacttttttttaatattgcattttacagaaaaatgaagatctgatttaaatttatgaaaaaaatacatccaaaagttaacaaaatatctaaattaaaacattttcattataaaaacacatatacaaagcttctacactattaataatagtaccaaaataattattaaaacagtaattaaaattgcaatacagcaattaccacccatttcattagtttccataaacttattaattttcttcataccattattaagaattttaatatttaatctttccattctatcatcaacatcatttataatatcttgttgataatttaattcatcattaattgttattgcttgtttatgtaaattattaattgtatttgttaattcatttgatattaaatcatcttgttgttgtaataattgttgatggtattcctttaatgcaattggatcatccaattgtgaatttgattgtaattcattatcaacatctgattgtatatcatccttaaatggatttataccataaccaccttttaaatttgatatatttttattattcaaaatattatttaattgattatttaatgattttatcttttccttacgtgaatttaattcatctgatgatatagaaaatggatttattaataaattttcaggattttcaatcattttaatactttcctgtaaatcctttatacatgaaacaatttcattttgtaatgttaaaaaatcaagtgattgtggtgatgtttgattaagttgttcaattaatggtgttgttgaggcatataatgtatcgaatggatccattgtttatatgttttgattatcgaagaaaaaaggtatagtaaactcaaatatttataggtttcatgcatgtctctaatctaagggagtgagaaaaaagaaactaattattatagcgagataaattaatgcatgattaatttgatttcatatatattttatcgatattgtaatttctttatcaattaacaaagatcaatatgagtgtattattacccaatgttgatgatgttagttcggatggattgaaaaggatgaatgttataatgaaggttaataacgagcaaatattttcattattaagttcatatacatgtgacaattcaaaaatttcagtagttgttaaagatggtaagattgttggtttcaaaaaaattaataataataatgataataataaaaaagttgaaattgttaaaagtaatgttgttaaggaatcaactggaacaatttatcataacattggaggtaataattcagttaatttaggtatgttagattatagattaaatttaatcaattataagcctaaaattgaggataaagatattgaaaatgttaagcaatttgaaatgattgttaaagtattatcgattgttattaagaatatagacaaggagactagagatggaattgtatgtaaaactgatgatgttatgagagaattccctggtaatcacgatgaagttaaaaaagtatttgataaaattatgaataatggaattattaaatgggaatggttcaaattaataagaaatttcaagaatagacaatggatgaaacaattacttattgaaggatatcgacctaatgatgcatatatgatgatttatagtggtaaagtaagtgaagaattacaaaggggtaaagaacctggtcaaaatcaacaaaataatgatgatatagcagtatttactgagagtggatcaactacaccaattgataatgttagttctaagacaagtgtaagtagtatcaatagtcaattttctagagttggatcagtaaatagtcgagaatcaagttatgaaagggatgaaaagagtgaaaaagaagagaagattgaaaggaatgaacgatctaataagagaaagaaagttgaaataggggaagatgaagttgttgttaagagagttaaaagtaataccaatgaaagagatgaaacagttaagttaatcaaggaatataagaagaaatatgtgatatattttgaaatgtatgataaattaaggaaatgggaaagtaagggagtaaaggatgaaaatagagatgttaattataatattgataaacttattaaaatgcataatgaacttgagagtattaagagtcaagttaagagtatgagagataagttattatagtttatagtgttagttttaataaattaataaataaataaatgacattaaagaatcttttttttttccatttctatacagtaaataggattaaatctataataattttctatcaacaaattgttgataaagagcagcacctaatctaccaggagaaggaacaacttcaacatttgcagcagtcaatgcttcaattttagattgtgcggtacctttaccaccagagataagagcacctgcatgacccattcttctaccaggtggagcagttaaacctgcaataaatgaaacaacaggttttggaacatctcttgttaaattatattgtttaaggaattcagcagcttcctcttcagctgaaccaccaatttcaccaatcataataataccttcagtttctggatcattaaggaaaagggttaaagcatcaataaaattagtaccaggtgaaggatcaccacccataccaataactaaagtttgacctaaaccaacttgagttgtttgggcaactgcttcatatgtaagagtaccagatcttgaaacaataccaattttaccctttttatgaattgattgaggcataataccaattttacattgttcaggagcaataataccaggacaatttggaccaaccattctagtctttgattgagttttcaacatttgactaattctaagcatatcttgttgaggtataccttcagtaatacaaacaaccaatgggatttcagcttcaattgcttcagcaactgcagaagcagcaattggaggtggaacaaaaatacctgaagcagttgcaccactatatttcattgcatctgcaacagttgcataaacaggtctatctaaatgagtttcacctgctttctttggattagtaccaccaactatttgagtaccatattcaattgcttgttgagcatggaaagttgcttgtctaccagtgaaaccttgaaagataactttagtatctttattaattttaaggttattaatagtatcagcgtaatttctgacaatacgggtagtatgaattgatcttctgaacattgttatataatgaggtgtgtgatattatacagggttacctttaaaattaagatattgcaaataaaagaagaagattaccagttataaataaccaatggtgtaaaatttattgaatgacccgcttccactgaattctcatggattacactccgccgagccgaatttttcattattgaattataattacaattataatcaatgtattccacccgggtaagttatataagtatacaggtagaatactctttcatctatttaataactaaatacacatccgtaggtcaatgatctggcaccgagtaactcccaatcttcatcacttataatcaactcctctgctacctttaatctagcaaatacacatcctcccttccatccagctgtacgtgaatctgcctctccagatgacatacctgctgtaacatcaactgtagcattagtattagtattaatattaatattattactaccattaccattaccatcattatcacccattataatctcttccattgaacctttcttaactgcattaacaaatcctatattacttaaaatttcattacgttcaatatgaattctatcaattaaaatattctcaattccttcaattttaccaccacctccaataacacaaatatttgaataaaatttatctaatttactattatcattaccactattaatacctgcaattgtaatactttcaataatcgcaatatctaatggtgtaatattcttaatattcttttcctctttctctttaacattctcaaataatttctttaaaaattcttcaatgttttcacgtctattattgttactattactaacttcatttatttcatgtaaaaatttaataatatcttcatcatttttatcaacaattgaaatacctctactttgaatctcttgtaatatagataatggttctgaattattatatcctgtaaattcataactatctcccttaaataatcttcctttactaacactatcttccttgttctcattgaaaacttcaggataaaacatacccatacatgaaatcatattttcatcaaatatcttaaatttataccttcttgcactcttattactttcatattctaataaattaccaacttgaataactcctgtcttattatcattaaatgtacaatgttcaaaaaataaattctcaattagtttccaatcttttaatttatttaaattaatattaatctttgggaattgttgttgaattaataatttacaccaaaatttaataacatcatttagtccataatttaaaacaattctactatcttcaacaatcataccttcatcaacacaacaaatatgaatattatcactaccaatatcaacaatacatccagtactaacacctaatccaaatgatgcagataatccatcttgaataaatgatacatttttaaatctaaatttattgaaaaataattcaatcatatcttcaacatatgtcttacgatataatgatggtataacaaacataatattaactttattaaattcttcattcttagttatattaaatttattctttaaaatatgtctgaacataatttcaatatctccaagtaattcctctttactattatatttatcatcatattcattaaatccaatttcaacttgactctctttaccttcttcaccatctttaatacaattgaataaaaatggtcttctaattatccattcttcttcatcctttaatctgaaaacttcatctcctataacatattttctacccatttctttaatccatttagaactttcaataaacatatttttatcattataactatcattctcaacaccttcattactaaattcttcttcatctccaatattttctaaattatttgtctcatattgttgtttcctattaaatttaaaacatgcactatgacaatttggtaaaatacgatgtttataatatctcattctctctttataacttttaataattggtttacatttatccttgagttctttttcatcctttaatgcaaaataacttttaacttttttaccatctttaccaattttctctttttcattatcatcatcatcataatcctcatcattatcattttcattatcgttttcattgttatcatcattttcatcatcatcatcatcatcttcagccttatcacctttaacaaatattctttcaggatataatccattaacatcaaatttatcacgtttttcattatttgatttaccattataattatcctttgcataaccaataatatttggaattataattggatcaacatcatcagcccaaccaattttaatatcatgactaccagggtgaataacaattgttctattttcatttaaattattttcatcatcatcatcctcagtttcagttatattaccagcaccactaattgtctctgattttttcaataattcaattgaaccatttacttgtttaatttttaaacttttattaattttatcccttgaattcctaacaattctaagattttcatctctctttaaatattctgtaaaataatttttttggttaattaataaaacttgtggaattgttgaaaaatttaaattattttcaacttcattacgtttaataccttgttcatctaatcttaattgtaatttttcactagctttttgacgatcttgtcgacgttttaataaaatatcaggatcagttgttgtatgcgatcttttattagtattaggttgcattgttattaaatgaaggaatataaagaagaagtgtcgatggtataacaattaaatattgcaacaccttttccaaaaattacatgcgtttctgaaattcgtgtttaactatataatctttttttacataaatacatctacatacaacaatacccaatttaaaccatattttaacaagaaccagcttgttatccatcatacatgtcttgtatatcatttaatctaaacacattgttcaccatcatcaaatatccttataaaaaattcaactaaatttttccatctaacaactatacacattgttaaacacatcaatgaaaataaaatactcgtcataaccatacctgatgttaaaactgtataagttgaaaatgataaaactgttaaaactaaccataaagtatcaggtaaattaggtaattcatgtttaataatcaatgcaaatttatgaattaaagttgacttggaagattgtaagatatatggtgtataataagtttcactattaataaattcaacaaaatcaagaacatcattaaatacgttatcagaataggcggaaattgaaactaaatttgtaattaatctgtaaatacaaaataataacattgtaacagttaaaatacctgccagttcaagccatattggttgtctatttaatggttctaatggaatatgatgtgtatgaggaggtatatgtcgatcattattatttatgttatttatgttattattattattattattattattattattattatgacgacgaccagttattgaaataccggaattatcctgaataagcgattcccaaataattctattagttaaattaccattaccatttctatttctcatattcatttgtctttcataattcataattacatctcttgcatcattaattgatcttattaatgggaaacgtatttgaatattgttatcattattttcaccatttgggaacgaattattaaccaactgattggccaatgtaatcaagtcatctatatccagttcaggtatattcacatctaactcatgttccattataccacagtctcttccttgctggtaagaaacccagtgactgtaaattgaccatttaatttattaacagtggcatgtgaaaaaacgataatacgcggaaggctcatcaatttataccccctttctttaccttcttattattcttatccttcttcatcttgttttgctatggaacacttacccattgaagtgatacattcagttgtagacttactggatatgaagagtatactctcattatcttcatgttgtaaaaaattaaacaaaattgtattcttagaatgtaaatcattgtgtatttacactgataataatattaaaacaaatttccataattataacaattcttattctttaacaataagtgcaaataactggtatttgtttattagatatgtacaacggcatactaattgtctattaaatactcatacaattgttatcattaataaagaaagtatatttcattcaatgataagtcaaaacacaccaccttcttcatcatccacactgtcaacaacaacaacattatcatcatcacccattacaacaacagcattcaaggcactaaggaagtcaatcaagagcatatccactgaatacctgcctaatctcaaagatacactttatatccaatagaaacagtcgcgtctgtacatcctctatttctactactgtacaccatacataataataataataatattaaattctttcccctcatgaaaatatattacaattacaatcatcaaattcaaacctcttattactggttgattactgttaatctttcaaatattatataaatcaaataatcaaataatgtctggaggtcctgttcctgtgtggaagaaatatacaactggttcaactggtatttgggaaactttcagaaaatgggcaactttagtaccaaatagatcatcaggtaatccttatgttccatattatagagttccatcaccttcaagtgagaaacatatttataaagatgcaagaacaattcctgcaagtgatattgtaaataatgatttctttgcaagagataatagaagaaatcatccacgtatttcaacttttaatcaatcacaaattggtgggttacttaaattaggtaataaaactaattcaagattaccaaatggtgatgaaggtgttaaacaattagctgttttgaaaaatgaatcagttaaattagttgatgtcttaaaatcaactccaaaggacgttctttttggtgaagttttaggtaaatcaggtgaaccaattgttgctccaagtttaaataaaaaattctctgttaaaattattacagaggaagaacatggtatgtataaagatgatgaatatcctgttagaatctttaaggcatcttgttaattgtatttattcatttttatttagccctacttattaatatttatatattctctctaacttaaaataaattatttatgaaaaataaaagaggtcaatctcttttaatatcaatatcataaccttgtttctctgccatcaattgatgatgaacaatatcatcactttcccatggatatgctatccaacaatcaggtgtttcccttgctgcaatataatgtccctcctttgcaatacattcaggtacttcagctctcttttcctttattttattatgtaaaacaaacatataaaattcagtatttaatttaccattatctgattgattaattgcatccttaactaattcattaacagcataatgaattgttgtacgtgaatcatcaacttcatcaataattaaaatttttttaccattaagattaattttagaatcattataattaatccattgaattcttttaacttctgtaccaacttcttcttcatcatcaccccttgttttaatatcttcatataatgataaaataattgcaaatatttttttactactttcaccaggttttttaagaaatgtacgtaaaatacgtgcaggtataaatccaccacctccaattgcaattataaaatcaatatccagtgaaattattttgggtgcaatctctttacataattcatgaatatgattatatgaaatgtatatcttatcctctgacatttgttaattataatgaataaaagcaaagtatataattaatagaagtttttgataatctcacgataagaaaataataaataaacgtgtacatcatcgataatagatttgatttgatatataatttgatttgatggataagaaaatttatgattttttataaacaatgattaaattttatataaaaaggcattatacgtaattaacattctctttgtgcaaatgattcaatcataccaatacatgattcttcatattctctacattcaacactaccatcttcattaacaaatgtatttgcttgaactaattgtttacgtggtaattttttctttaaaattatatctctaaattttaaaatttcttcaggtatctttgtttgttcattatagaaatttgtaccattaataacatcaccactacatttgtaaacatgtaatttatttaaaaattctccaattgattcttgtccaattgtttcaattttacttctatcaattttaattgttaaatcactaaaatcttcctttgtatattctaatttaacaaaatcattacctgcatctaaataatttttcaaaattgcatatcttgcttgacaatgtgcttgaccccatttatttaattttggatcatagtattccattgctaataaacctgcacgacacattgaaacatacataatataaattatatcatcttgttcttcctttgttttaaaaccgaaaatacttaataattctctatttgtacctaaaaacattgcaacactttcagctctacattcctcatatgaacctgcaattgaaccaaattttgaaccccaagtttcaccctttttataatatgtatcaattggtttattattaagaccaattggaggattttctttatcaaaattaaaagtaccatcatctaattccatcatcaatttacctgtaccatgacctaataattcatgaataccaacttgaacttcaaatgaatcaactctatatttttcatataattcttgtaaattatcttcaataaatgaagtcttttcatttgaagattttgcacttaaaacattaccaagtgaaacatttttaaaaccaatattaattctaattttatcataatttggaatattaataccagctggacaacctgaacctgcaaatgttaaaacttctaatgatgtaaaatctggtggtgtgaaaacatctttttcaaaatttttattccaaggtaaatcatttatataatttttagcattattaaccaattcaccaaattttgcagttctttccttattaaccattgcaactaaacattcccattcaccctttgtaccaagataatctctataagtttcaataaatccaatattagtttcaacacttggatttaaatctttaacccaatgaatttgtgattgataatgacaattcattgaacctgtcataaatgatgaaatataattttctaacattttaacttgattttcatttgctgcataatttttagccatttgtaaattttcaacaattttagtaaattcttttgaatgatcaccaaattggaaagtaagtaaacagtctctatcgttgactttgaaattaataatatcaggatagtaaccagttgcatttgaaatgaatgaacttgcaacatgaacaataaatttattatcatcattagaagattttgaaactctgatattttcaggcatgataccattagcagctaatgcagaatcaattgcttcaccttcatctttagtaactaaattaaggtaataacctgaaacgtgaccatcttctggagctccaagcattgaaattttttcatctaatgaataaattgatgatttaacattattaaataaggatgtaatttcatcattattcaattcatcaataattgattggaattgatcaattgttaatcttggaatgaatttagaatcaccgaatgatttataattacctaaattagctaaaacttgtgaagaatattgtaaataattagtaataatttcattatcaattttactaaaatatttaatataatccttatttgggattaatttatgaattttcaagattaaatcaaaaataccttcactttcaggtgatactgatctaagaactgctcttgaaccccaatgaccagcttttgaaaaataatgagcatacaatttttcatttaatgataaattgttgaagaattttgtagcagataatgcagcaattggagcatctttatcagcataatattgtttaatatccaaagacatgtttctaataaaagatcttgatgtagatatagataccaaacgagaagaagtacgtaaagaaaggcaaattaccattatcctgagaggaaaagtgacatatagagagagagtagccaaaatgacgtttttcaaaatttatataggggaattcgcttttatctctcttaagagcatgtttacagaaggtttatcttttaaataaatattacttttacaactgctatggagagacacccgcagaataaggtacaggatgaattatatgagaagagtttggtacagttgaaggaactcaatagtaatattgaacgtatgaatagtttattaatggaaactaataaaattaatgaaactggtgttttagtaggtcaacttaatagtgcatatattgatggagttgcattccaattagatttgcataaagattaaaaatttgtattaatagttttgtgtgtatatatgttatttagtatagtatataatatttctttttcttttcttttttcttaagaaacttagattaaatatctttaccaggaagcatattgaatctctttttaagggtaactctttgtcttgaaaatttatcatcaggggagaatctagcaggatgtgcagatttagtaatttcacctgattctgtgactttctttaaagtgtatattcttttaccatctggtcctaatgtgtacattaaatgcatattgaatgtgtgtctactgaagtggtatctctatagaagatctactggttaaagtgaaatattttaattttatttaaataattttaaagagatagaaaatttttttttcactgtgggagggaagtcgcgtcgttttaggtgatgaggttttttactatattcactgtctacatgaataatgtatcagatcatggtagaggtggtttcttttgggtagacaataatggacgatatatttgctgatttacttaaaccagtggttaataaggatactagcaataatggtaataccttactgaagagtagaagtaataatgtcaatctggatctggattttttagataattatgtttcaaaacctgttaataatagtaataataataatagtaataataataataatgatttattcggtgatttattaagtgatagaccattgagtaagaacaataatactcaaattaagaacaattttaataataatgatgatctgttggatttgggatttaatgttaatacaaagactaataataacaataataataataatattaataccaatacttttgatgatctactaggaggaatggaccaaaagccagtacagaaagctcctattaatgaaccttcagcaattaagaattcaacttcattaagagattcagcattggctgaattattagatatgggattccccatttcaaaagcaaacacagcacttgattcaacttcatcaggttatgatcttaatgaagcaatatcttatcttatgaataatgcacataaaacaaagtcaacatcaaatctcaattcttttccaaaacctcaacaacctgatgattttagtaaaattgttaatgatttatcaacagattttatgtcaactgcttcatttttatttaattcaagtaaaaagcaattacagaaaggtgttgaaatgtataaaaatagtaatagaagggaaataggtgatggtacacctgcttggatgaaggatcaacatcgttatatgagagattcaattaatttacccgatgaggaagataatgattatataaatgaacaacatgaagtgatacgtgagccggaggtaagaaaacctgtacttagaaatactccaaaaaagaaaccacaaccacaaccacaaccaataacagtatcatcagcaccactaccaccaggtgaatcagtatcatcatcatcattacttgatttatcagtaccaaaattttcaattccaccattaaattcagctcaattacattcatacacatcatttagaaaaattgcacaagaaaaatttaagaatggtgattatgttttatcattggaaaattattcatcagcttctaatgatattccaattgatcatccatttcaaattattttattttcaaatatttcaataatttattcaaaacttggtaatcataaagatcaattaatttatgcaaataagggattagaattaattagtattataactaaaaatgttaatatcaattcattaaatgaatttataattgaagatggtaaatcaatcaagtcattttggagtaaattaatgtttaaaaaggctgaaagtttagaatttttagaaaaatggaatgaatctaaaattgcatatgaaacattaatatcatctggtgaatgctcaaaacctataatggatggtaagaatagatgtttaaagagtttatcaccaaaaccagtaactaaaccaatgtctaaaccgacaccaaagtcacaaactattactaaagataacaataatgaaaaattacaaagagttaaaaagagtaatgaattaaaaataagggaagatgaagaaaaatttaaattacatgatataattgaaaataaattgaataattggagagaaggaaataaggataatattagaggattattatgttcattagataaaattttatggccaagtttaaattggaaaccaattcaattaactgatttagtattggataaaaaagttaaaatattttatatgaaagcagttgcaaagacacatcctgataaaataagtaataatgaaacaattgaaaataaaatgattgcaaatggtgttttcattacattaaacgaagcatgggaaaaatttaaagataaatagattaatttatattataatattatactaaactaattataaaggcataatatttggaattggacctaaaggtgtaattccatgtggattaatttctgtatgagattttgtataatgagatttaatatggtcaaaattagttgtatccttaaaagcattattattccaatataattcttttaaatattgattaatatttggataatcatgtctaatcattttaatattacatttaaaatgttgatgataaacagcatcaaatctaactaatgttggaaataatctaatatctgcttcagtgattaaattacctaacaagaatttttcactattttcatgtctctcttttaataaatcttctaatttatctaaatatttgaaaacatttttaacttctctttcatagggttcttgctttgttgctaaacctgctttatagacaccattattaatatttgtataaatccaatcatttaattcatcaatttgatttcttaaattttcaggataaatatcaattttagcaaatttttcatcaataattgaattaaattcagtatttaatattctaataatttcagaactttcattattaacaattgtctctaattttttatcccataaaattggaactgtaaatctaccttgataatttggatctgccttaaaatataattctttaactctttggaaattatataaaggatcaggagtggaaccaattgcttcagttgaaccttcttcatttgttgcaaatctccaaccatttttacccatatgccaatgaactacagtaatttcaattatatttgttaaaccttttaaaatacgtgtaattaagacacgatgagcccaaggacatgaatatgagacatataaatgatatctattaggttcaggtttaaatttaccattaattgatattgtgtctctaaatgatgaagccagtctcttgtattcaccatcttcattagcaaatttttgaattacaattttacctgtcattataatatacgtgatgtgagctgtgtgtgttatgtatatataaaatgtgtatgtgctgtgttaattactcaattgtaagtgttgagtatcgttaaggcaattatataagcaattacaagtacaaattacaggtatttatacaagaaaagagacgtgaagaaggggaagaagtaataaattgtgagtcatgatattagttacctcgttgataagctttgttatcactttgtttattaatagttgtaggtatattgatcatttgaagttttcttttttgaatgtatcagttacttatcatttatataccattacaattcactcaattgaactcatatgagtttatatgataatttattagggtaatgcagcatatatctatataataagtttatccccccacatggtcaaagtaagctaagttaagcatggaaaatattgaggaaaaatttaaacagtgcaataatttacatttcaaattaatcaattgatgtttattatatgattattgttattattatattgtattgtatcttaaagtataatagagggacttaatatactcaatatacttaatatacctggcggatattacattttccaattaccgggttatcaattatcacatttttaacttaattttaaatcaatcacgttgatgtactaattattatatactgttcatctaggtactttctatctacatcttattaattaaccttaacatataaatgccgtgaagtatttaaatccttgaattgtaccgttttctttcaaattaaaaataatgtttcttttatttcaatgcttcttatattttaattatttcttaatattatctcttattttcatcttatcaattaataagaaaatctcattgaaaatgttagtatattcaattgctatttctcttttagcaacaatttcaattgctttacctttggataaagattataaaattaattcaaatgatatcactttaaagaacaatgattttgactggtcaagaccaacttttaatgatgatgcaattattgaaactgctttacaagttttacaaaatattgataattcaactttaactgattcttgtacaaaatgtaaatcaagattattatatggtaaagctttagctttatcaagacctgatttagttccttcaatttatgaacaatggtgtttaaatactggtaattactctgcttcaacttgtgcaactaattatcatagaaataccgctgataattcttcaactggttcaaattttgctgacatgttatctttaattaatcccttatcaatcgatgcagaatattggtgtcattataaagctgataaacaatgtaaagttccaaaattaccagaagatttatcaatctcccatttatggaatgatactaaacccgaaaaggcttatcatcctccaactgttggtaatgaaactatgaaagttttacatatttcagatttccatatcgaattagattatactgtcggtgcagaagctaattgtactgcttcaatgtgttgtactcctcattcaaagactaagaaaggtgctttaactgcaaatagatcttcagttgatgatttatatactgcattatttgaaggttcttattatgatttagatggtactttccatcaaggtgaaaaaattactgcattaaataatatttcagttcctgcaactcatttcggttattatgaatgtgacgccccagaagttttaattaattcttcattacattcaattgctgatttccaaagagaaaataatattacttttgattttgcaatctttactggtgatttagttgatcatgatgaaattgcttatacatcttatgaacaatgtgttgaagctgaatcaattatctttagagatattaaaaatacttttgatcaaatgccaatttatccagttttaggtaaccatgatactttcccatatggtcaattagctccttataaatcaggtttccaagctaaatttgattggaatgcagatttattagcagaattatggatggattatgattggattgattgggatcaagctcaaattgctaaaactcattataccggttattcaattaatactaagtcaggtttaaaagttattgcatttaattcaaatgcttggtaccaaaagaatgaatatgcttatattaatactgttgaagatccagattattttggtacttttgaattcttagttgaagaattattagacgctgaagcaaatgatcaaaaagtttggctaattttccatattccaatctctcaaactatgatgccacctcaagcaaaattatttactgatttagttgaaagattctctccttacacaattgctcatatctttaatggtcacactcatagagatgaattccaaatcttatattctaataataatggtactaaggaatcaaaacttgaagatgaagttattaatgttgcttacattactcaagctgtcactccttgggttgaaaataatccagcttggagatattatgaaattgataccacgtctttccaagttatgaatactttcaattactacactaaattgaatgaaacttttgcaagtaatgatgaaccagtttgggaatttgaatataatccaagagatgcttatgaaattgattggcctgaaacttctccattaaatgcaacttactggcatagagtttatgaaagtattgcttcaaatgcttctgttttacaacaatatgaaggttttgcaaagagatggtctccatatactgatgattgtatctcaactgaatcatgtaactgggatatctgttacgtttcttcattcactgatgatgaatatgaaacttgtatgaaaacttacaactatactgctgcatattagatctatgatcattgcttatattttattatattatttcacctccgtaatttatttttaatattttattgtctatatttgctacatatatacaccgtgggaaaaatttcgcacattgtcaaaaaataatttttaaaatctctggcaacattgactttggaacttttggagccaatttaccatacaaatttgttagtaaaaattagtcaaaaatcatcaaataatctttactgtaacatggtaaccaaacatctgaaatattgatggtgttgtactttatacttaaaacattggcatcatcgaacataaataataatatctctttcactcttatgaaaatccattgatcattctttcttatctttgcaaaacttcttggtcctactttctctattctagtatttctagagtaaataaagcctagccttttaactataagattgtttgatttcaagtcatacttcctcattaaatttttagcttgttttaataattctttattgatatccaaagtttttgatcttccataagtatagcacaaaaaaccatcatctttaaagtttgacaaataaaacattttatgatttgtcataaaacttaattttatttgaagagatttgaaaacattcaaacttggtctcgatagttttctgagatcaccacaaacacgttccatatagaaacaccaaatatctctaaaagaaccaaacctttcccaatcagataaaaaatgaaacatagtatgatttgcaagttgaaataatttcccaaaaattggttcatatttctcatctaaatacagagactctagctttaaacccaatttcatgaacccatctcttaatctgttcacaccatcatcatctaaaaatttttcaggaacattaaatgaaacaagactgacccaatatgcattatattctaataaatattttactatcataacataatcattttccaatgatggatcaagaagttctttttcaaaaggtaaaaaatataaagaaaacatatggctcaaagcttttgagtccacagctttcacttttatatcattcatttcatttttaaaaaaaatttttgtatcttttggatcttcaaaaactttaaatgatttgatctttttatgaattctctctcgataatccataaacatttttgatttgttcttatcaagagctttaaatttggaatttggaaacactgtgcaaactgcttttgcaaaaacattctcataaaaactgtgcatcaaatctggagtcactacatctaaatcaattgcatcacaatgtgagattaaaggctctgttttaactctccaccctttttttccaccaaactttttctcttttattatgtttttatattcttctgctgaaactttaacttcgttgagaaacctataaattttctttaatactttgtcacatacagaatcttcattttcatttgaagtttcaggatcttggtccaaattattcatttcctcatcctctgaatcaataagtggttttactaaaattttagtacctgtttttggtatacgacatgaataacaaggaaaagttcctttttgacctaatgtttccgttatttttgatatagaaggaatatcaccggtaaaggagatcaaattaaccttgaaagttatatactcatttgtagttggatccaaaaatgtaacacctttattagtgaggtactcaatttctttcatcaagggttttgccataataccggtaaaaccaatagtattttttttggttaaaaatgttatgggaacatgacaatagtccgttttatatctaacagactctggtaagtctaaaaaaataattgcaaaggactttgttcctttataagttttaatttgacagttgaaatcatctgaagcaatgcaaatattgaaaacaaatgtatttttcattctggattctttcattaaggattccttatatgcgagaccttgatttactgtaccatagaaaccactactattttttgctttttcctttacctctaacatcagttctctaatttcaccattcatatacatagttaccattgcagtttgaagtgactcatatctgaaggagagggcatcctttataccaagtttacatatgtcttccttttttggtggatctggtgcataacatgatttatcatcaatatgttcaaagaaatatagggattgtaaacatggacaaaacttaatggtaataccagtctgattttctttccaaagtttaagaactctgtcatgtaatttcctagtttctagctcatctatatctgtataacctctaccgtataaatattttaatgctttgttaccatcagtcattgatatcttattggtcgatgtcaaataaaatgtaaaaaacgttagtggtgatttgaactgttccatataactcttgttcataaaatgaacatacttttcaaaatcaagatcttttaccaaatattcccaagaatatttatcaatgtcaggtgtgtctatatctggaattgaaagaatattattgtcagttgtttcagtaggttggttaacatcaggtacagctgtattttcatttatatcaggaacatcattatcaattaatgtattatcaggttcattttgctcaatgattggatcacttggaataaaatttttatcgttagaatcatcaacttgtaaatgttttttgaaatatgttttacttcctgaatcaatcctattgaagtatctgtttgatgatatcatttttccacttttgttagtttctaatgcaggtgggatacttatactaatatctgattccgagccactagtctgttcatcttcctctggttctctaggttcatctaaaggaaacggttcattgtcaaaattctcaatcaaattattatttaaattattatttaaactctcatttaaattattgtttaaactctcatttgaattattatttaaactctcatttaaatcattattcagattattcaaattatcattctcttgattgttatcatacagattatcgttatctggcatatgatcatctgggatatcataaaatgccggtgatggtcttgcttgagtatattttttagcttcttgagaattttcagcataaacttcctcagaatcaattgatgcttcatttggtattaatacttcatctgatgatgatgatgattccaatgcttcatcttcttcacttgttgttaatgcattatctgatgctgatgattcatttgataaggaaattggatttttatttttggtttttgatcttctttcaaatttttcaggagtcattttcttaaacaattcaatttttattttcattctttttataccatctcctttacgtttaggtttatttatatccttcactggaacatcatttttttcaattgagcttaaatcggaagaataatcgttgaagtgaggtctttttttatctatccttttccttttaactgggttaagacctttagatttccatcctttgaacaagcataaattttttatagtttcatcaatgtgattgacaattaaagctgaattgacacatttgacctttaagtgtttgaatgaatctttatcaactgtctctaaatcattatacttcatatcttttctttttttataaggtaactttaatgactttccaagattaacacctgaaaacgtaagtgtgtcaagccaaccagtatactttccatgctttttttcttttaaatatttaaatgctttttcacccatgtttttttttgctatacctggaccgaaatatctgtagacttttttataactccaaacggaacgttcagaactaaaactatcaattgtcttgttgtaagtttcaatgtcaccatcggtatacattagcccagattttttgaaagaaatatctttctcatattctcttgctatcattgttgctactccaaggagttccattttacctaccaattgttcagtttgatctgcataaatttttataattttttgaagattggtaattaaagcatcaactgtaagatcatcctcaaacatgacattttgcttcataaattccaacaattcagtatcgattaaatgaacaaattcattttcatcgactttcattgtgtttaagtccctctagttattgagaaactagagaaaaaggaaaagaaacacgtaaataaagagaagatagcaaaaagacatgtacaaattctgatgagccttttattatttttattacgtaatccggatttaaaaattcagactaaaatgactgagccaccttgaattacatttactatggtaaaaattgacttttccctaaaaaactatggttagaatctcctagattccctcattacaatgatactatacatttaatctgtagatgcgtagttatttagttataaacatttgaaaattgaaaattagtcaaaattttgaaaaaaatttttttactatgagaaaaattggcactttttcccacggtgtatatatagtcaaattcaaattaaacattattttatttttataaaaaaattagattttataattaattagacaatttccatataatttaaatagtttaaaccgcatatctaactagatgatttacttttaacaatagaatcttcatatttttttaatgctgtgttcaatgaaaaaactaatggttcaaataattctttctcggtttccttttcctttgaatttctacaatcttcaatttgtgcttcaactcttactaaacattttttgattgaaaaataatgttttcgtaatttgattaaatctgatttaaaatttggatcagttgcaggtgttgatgatgcagttatattaaattgagtccaaaattgtcttaaaaattcaattgatgttgcatgtgttaatttaacactatctaattttttattatctaaattaatttttattccactatcttcatcttctttatttcttttattattattaccttttatagtattaccagttgatggtaatccaagtaaatcatttaaattattattgttttgtgccaatttggcattttgtttaactatattattgatatctttatatgaatcattttgctttttaccttcctctttcatatttttatatacacgtgtaagatcatatttttccttgaaggtatcttttaaatcctgtaaacttaaatcgtattcacataattcaggatttaaatttgattgattgattactttatttattaattcttgtggtattatattcaatgaaacgttagatgattgtgtatatttaagttcattatattcaacttgatttgactcatcaagatcattaagttccaattctttaataatttcatcgtctaaatcatcagtatttgttggttgttcatccgttatttcagccattaatcttctactcaatctattcattgttcttaatatcccaactaattcaggatcttgattatctttcatagttatatcaggtgtattaccctttaattgagagtcatctgatctattaccttcaatatccaaatatttaggtataggtgcaccattactactgaataacttcacttttttcttctttgccattttttcagctgaaactatcttccttctctttttatcataattatttacaatatgggaattatcgttattgtttggatcatcatttattacttgttcatcatcaatttcttcttcaccatcataatctggatcaatatataaatatttatccaatgtaatatcaccacgatcataaatattgaccttttcacccctcaattttctgaaaagtttactactgaaaaatcttgaccaaaattcaccctctgacattcttggaacattatcatcatatgctttacgaacaattggatattgtttgaaaatttctttaattttttctcttgtaacattaacattaacttcattatcagatgatgcaactggtttaatagtacttaaaacattatatggacctttcttttgattgttttgaattgcgaaagatcttaataaatgaattctactcttccaaaattcttctgcctccattccttccttaataacagcttctgtaaaagttctcataagtttaacattatctcttaacaatcgttgttgaagtgctaagttcttaatcaattgcttactattcaacaattctgctaaaaatctatcatttttcaaatcattatcaagtggcagttgttctttaacactacttggcgtgctagagttattctctctacttttttcatttactgtaccattggagcttggagccggactctctgttccctctgttccagtttcttcactattgacaactttactcttctccatattgatggaagttttctttctggcaataatttgttgaatggatactttaacattgtccataacatctctactattgaaaccaaataaaatttcctttcctgtttccaatcctatttttaacatcattttttcacttgtttcaggtgtagcttttaaaaatccaacagtatctaatgataattcaactgtatttgtagttgcatccatatctgcacatttccatgttaataaagcaggtgatttatcctcttcaatagtcagcatcccagcttttttcttatgcgtcgcctgtcctcttattaacgccatagttaaattatcaatcctggctagtgatgtacagtaaagatacactctaataattcaaaagatcaggaatatagctaaggataaattgcaatgatttagattattacgcaatttcttacactttttttttctatgttgattttcatacttcagaaaacctaccacttcattttagttaataagaagttgtttcttttgataagagactataccctctttctataaatcaagtatgaatagattaatattaagaccctttacaagggtatccccattaatgaaaatacaacaaatcccatcatttagaacattttcaataacttcaaataaattagcaatttctcgtaaacataattatgaaactgaagcaacaattactgttgatcctaagactggtgaaaaaacattcaaaaaaccaatgacaattaatacagaactacctgatgatccacgtccaaaggaaagattacaatcaattttaacatttttagtatttgcagctggtatgactgctgcttgtcttggtatttttaactatgaaaaagtttcatcaccaattatgaatgcaacaatgtatttcttaagacgtagtagtcatgccagagagttattaggtaataaaatcacgtatgatggtatgttcccttggatatcaggtgaagttaatacaatgaaaggtattgttgattgtcaaacacaaatttgtggtgataaagattccgctttaatgattttaaaggctgaaaagaatcatgaagataaatttattattattcaatggttattaattggttctaatggtgatgttgttgatttaactaatgatgccagtgttgatttatcattttaagttaggtaacgataattaaatcagacttttttttcaattacacatattattgggggaaacaaaatacgcttatccagtttagtttaacttgtatataaaataaataaataataaagaatgttttaaaatataaataaatggatgaagctgtaaatataaattcttaaccaatgtcgatgtaatcccaatgcatttaatcataataaaactaataataaaaataaaagtcaaactattgtaaacataaactacacttttctataactatctaaccattcacgtcttttttgattatatttttcttcagcacggtcaacctctataattaaatggctatcattagaattaagtcttctatgaaaattagtacgagttgatgaactttcatattcaaggctttgaggtatactatcattgaagtgatcaatcataatttcgttagtttcactgtcttcttttatatcactttcatcttcatcatcaggtttaccttcaaaatcttgttcattttcactatcaaaatccatattttgtaattggaatcgttgattagaaggtggtgtatcaaatggtgaagtatataagttagcttgcttaacaggagtatcaaaatgatctaattcatgagcagcattataatcatcatcattatgaatggaacttccctttgaaccttgttgacttatacttggtgttggtgattgaagttttgaatatcgaagtggtatttctcctaaaacttttggattcattggtgtatcatcttgaagtaatttatataaatcattattcgattgtgaagttacattcccatttttcataggagtggttggattattgaaaatattatttgattcattcattgattcaccaccaagggaagcagatgatgcatgtttagatgtatttccactatttagcgtttcatcaggtaaaactggtatcattgattgataaaatgctttaaaattttcagtactttgctgttgtgataatttacttggagaataatttttcccaatagtatttctcttgtttggtggtaatttctgtaatttatcatgttcatccttattcagcaatcttagtcccataattttggaacttttcctgaaactacgatcaccagctcggataacaactggaccatctggttcacgatcatcgagatcattattatcaacatcaacattctttgcgtcgactcttttaactaaatcgtcggttgaaaaatcttttatatgactttcctttggggtatctattatatgatccaaatctagatcaagagcatcatcttcatcttgtccgtttccttccagatcttttttatatttcagtttctgtcgataccaaaaacctgcggtgactagtataaacactaaggtaggcacccctatagccattccaacggcaagccctgttgtactgtacattctctttaatatctcctctgtgtgaagaagcccaactaaagaaaacccaatataaaaaaatacccaaagatcaaacaatacataataataataatcatgataataataaaatagctcttcctctaaaggtccagatcaaatcccccctacgttaatcaaaaagagaaaaaaaatttaaagttttcgaaaacaaacgcgatcgtctttcatttattatggattacgtaatatctaacatctatttatctctatttacatggtcttgtgatatgtacaagtatacaatctaatctaatctaacatggtttattttctgttttgacggctttgacgacgggtccatttgtctccacgttttatcactttgattaactctttggaaaatgtaacaaaccctaatctctcacacaaacttatcaatgccttcaagtggtatttattccacacaaatctattttgtgaacttaaaactaatttatatgcatcacctacattacctgtttcagttaatgtgcttaacatcaatctagcaaatttgaaatcagcattatcttgttgggaaggggtgagtttttgaaaatgttcagattgacggtactttccacgttctgtccatatcttttgtgcaaatgaaagacttttttgatgtcttgaagtatgcatacacatactgtacaatctatcctcacgcaatctttttccaaatgaatatttagagacggatgcttcatttataatatccgttgattcagtaggttcactttcatttggtatctcctctggttcctcgattgtaacatgttcttcgtctttaatactgctattatcaaaaaccgtgaaactattccattcattttcgaatatatccaatgaaccatatctaccaagaacatataagtatgcctcaacaatttctgcactgatatagttaccaccgtgaaattcagttaaatatttccacaatgcatgcgattcctttaacattaatttagtatctacaccatcaaatttaataattggtaataatggaggtgcattttcatgaaatccaaaatttgtaagttctaatactttcttacgaattgctctaactcttggatcaaccaaaccaactggcacatgtttaatatcattttttaaatcatcaattacatctccagttctatagtatgtattaaataaccatttggtacatctagcatgaggtaatgttaattcagcatttaatttagtatttgtttcacaaatattcatccaaatgccacgtacaaacggtaaatcactatcaacatatgcaagatacatcataatttccataacctgagaatcgactgggtatccattttcataatatttaattaaaaagtcccatccttgactaaccattcctctacgtgcaccacatcctttagcaagtgctaataatgcctctggttcaggttgaatatttttttcaaccatctcttcgtaaactgaaacaccatgttcaatattgttattcagtgtatccattaaaaccattgatgtataagtatgtgcagaaggggatgtttttaatgacaaaaatttcattgtatcaaaggtttccttggctaattgataatcatttaatcgtatgtacatttgcataattgatgtatatattattggtgatgtattcattgggttctcatttgctggaagtccattcagtaaattgacatatttacgaacatttttcacatcacccattctagcataatgatttaatataatcgcctttgttgttacatttgcgactaatttatcttcatgtttttgtaattcttgactctcttcattagcttctatgttttttccttcatctttattcggtggtttgaaatcaatttcaatatcacttatcaaggtttccattaatattttggctttttcctttgacattaagttagttaaagccattaaatcattcataacatgaatattaccccaaagaacaccactcattaatgctaattcgtgtaatttttctacgatcttcactttatgcttccttggaatagctttaacaagttgatggaaatcatatccattaaattcattttctaatgtaagatcatttgataatggattacagataccacttttcaaaagtgcgtcaatgacaggttcccaatttgcagtttcttcacttgcaatatttgatataacttctaaaggtagtatttgtttaatgttttcaggaatttgtacataagtcttaggttttggaaaaatatctagtagattttctggattttccaagtctttaacacttgtgtcaacaacaacattgtctttatcgtttacgttcttactttcaatttgtttagcttcaatatttggagttggagctgatatacctaatgatgcaaaaacttcgtcgatatctttttcagtgggctcttcctcatctttaatagaagttgactcttctttaacttgattatgtttttcttcatcctctttcttctttatcgtttctttgatttctttagtcattttctccaatgcatctaactgtcgtgccagatctgagttaatcttgttcaattttactgattctttatcatttcctcttcgagttttagtatttacatgaatatttcttattgtgatagtttgtattggcatgaatcgtatatttttgaataatgaaactcttacattcttactcaacaaaacattcctgagcatattactcattctgttcggtggtttaagtattgttgatgatatatcatagtgctacattaaagtgaaaaattcatgttccaacagaaatttttttagctctccggaaaaaaaatatttcccactgagagatcagtgaaacttgctatttgtaatatatacacagtgatatatccttagttacatcaaaactatactttgtaataacaatattcttctctaaatttacgaaaaataaataatgtataaaaaataaatcatattaaaccatatgaatgcaatacatgggaaaaaaacttttccatagtgtcctccccttctcctatataaacatgagctttggaatggaaaataacttgtaaattattccagccaaaatgataatctcgtataatacaagatataattgccaaaaacattttaactccacgaccatttcctaaactccaaaatacaatcaataattcaatagatttggatacaacttcatggtttaaatctagaagaaggtctaaacttgttggtattgaaagtatagagtaatcatctttaaaatctttgaataacttaacaacagagggtttgagtaaacttttagtaaaaccttctttgaatttaactgtgaaaatatgaacatgaagccaataaatcatatctctcacttgaggagtagaatatccaacttgtatcaaagagtatgctattctagcaagttctcttaacaccgtctgtatcggtaaagctggaattttgggtagtttattaatgtcaagatttaagcacggaactggtctggcaatcggctgtagtatagtttctaatgataagagttcaaattctgacaactcaatttcttttgggaacagctttttcacatctagtggtagagctttacttacattagaaatctcttcgtcagaagtctccattttctgagagtctgatcgcttgaatggtggtgtcagtagtgtgtttgagccaagtttatatattatcattttcctgaataataaaaatttcgtggacttatcaatatcagtaaccaaaatatatttccgtacttcgttacaatttgcactagttaatgcacttttctccgacaaatattttagccttgaatcacttatagcttttttatgattaactttgattttatgtttggaagattttaaggcctgtttacttgaatgatttataagctttttaaattctctttcgtgtttttcaagttctgctttatcttttgggggtatccatgaaggtctagtgactgaaagtttagaaagtttctctgtagatgctaatgataaatcatcaatacttgagattatatcagatttaacggtttgtggcatcggttgtgtttttctcttttgaagttcaccagttgcatgattttgtgatgaaaattcataaaatgttgaaagttgttgtgctgctggtgataatgcaataaatgacggatttttctgtaatgcaggactctggaaaccagtttgtgaaattgaaccaggtaatggtgatggtggtattataagattggactgggattcattccatgctttacgcatagcatctcgggattctgcgggattattctgaaatatacctaatgatgatgcagatgcaattggaacattgtacatgaatatatcatcaatgtgaccaacatcatcgtccttattttcatcgtataacttgtcacgttgctttttcgttaaatgctgtgtacttcgacgtcttgggagtctagtttgaggtaatgaaggggttgaacgaaacttcaacgatacatcaatttccagcggtcgttgattcattatttcatggtcactagttatagacatgactaatgaatccccaaatcaatatcttttcgtcaaaaaaacaagatatatggtattgggtaaatttgatttttttagtgttgatgttttgttctttgagatcgagctcggtctttatttttttttttttcatgcatcaattcatggcaaactcttacaaataggaattatgtttcaattgtattataaattaaaattaaatacgttctacaatactcttgaccacagtatactcatccaccccaaaaactgatccctcacgaccaaatcctgatcttctaacacctccaaatggtaatgcagcttcacttataagtccggtgttaactccgaccatacctacatcaagcatactggatcccacacgacattcttccctgcttgaactgaaaatgtatccagctaatccaacatcttcaatgttttgggatgctttacgacatatgttttccatagaatcattgtatggacaaattgcagcaacaggcccaaaaatttcagtttcgtaaattttcatcttgtcagtaactccaccaagtacagtcatttcataaaatgaaggacctaaatcatcacgtctcttacctccaagtaaaactttagcacccttggaaatggcatcttgaacaagggaatcgactttatcaacggctcttctatgtaccaatggaccatgtgtcactgttggatccatacctggacccaaacgtacagtttctttcaatctagagacaagcaattctacaaactcatcataaacttcttcatgaatgtatatcctatttacacaaacacatgtctgaccactacttctaaatttaccagctatgagttcatcaactgctctacttaattcatgtgaagaattcatattacttacaataaatggtgcatttccacctaattccatagaaacctttttgacagttgatgcacattgctcaagtaataatgatcccactcttgtacttcctgtaaaactaatttttcgtaattctggtgattcacaaaacattttaccaaataatggagttcttttctcctcaactggtgttatattgataagaccatcgggtatgttagcttcttggcaaatcttggcaaatgctaatgctgtcaatggtgtatctgctgcaggcttgattataacagaacatccagcagctaaagctgcacctaatttccttgtaatcatagcaagagggaagttccacggagttaaaataccaactggtccaataggttctcttaaacttacaatcttcttatttggaaacgcactatcaattactgatccattaatcctacaagcttcatctgcaaaccattcaagaaatgaagcaccatatagaacttcgcccatcgaatctttcaatggtttaccattttctaatgtaattaattttgctaaatcttcactatttgcaatgactgattcatttaattttcttaacattaatgcacgttgttttggtgtaaatgtcttgaaattgaaaaatgcatttttagttacttgaaaagcttttgataattcattgtttgttgttgcattgatctcgattaatttacttccatcaaatggattggtgacatcaaatttaattgcgtccaattcattagtaaatttcccattgatgaaaggacttgtctggatcaaactctggtttttaattactttaagtgtttgaaaagcactattactataaaatcttttcaaggagacggtcattgtctaagaaagaagtgagttaacacacaatttgtgtaacattattaatttatatatttcactgtcccatttcattccgggaaatttgtctaaaaatgacgcgcctcctaaagatgatcatattacaattattcaattagactatatatttgccataaaatattatcttcacttgatacgtagaattatttattgtattgaatttattaattattatatacattactattgatcattattcattatcaaaattatccttgtcagttttatacataacatttaagaaacaaccaacaagttcatcaacgacgctggaagtactaatactttcagcaacaccatataattgagcggtatcactcttaattgaatctttaccttctcttttagtaatttcaacacattctgcaacacatttctttaaatcattaattaaatcaagaattgattgattagttaattttgtaacagctaaatgtaatgcagcaggttgttgtaaactacttaaatgccaaccatatttcttactcatcatatcacctaaagcatgaatatttattacatcactcttaaatgaaataacagataataatggatcaccaataagatctaattcatcaatttcattaacaattgcatgtttaagtaattttgcattttctaaaatatcagtaataatttcagtataaccatcatcacctaaatgaatcattgtagcccatgcaccaacagtaagtgcaccaggtcttgaacctgctaaagttggtgaaccatataaaccacccacccaatcagaagagatataatattgatattttctataatctgaatttttatacattatgattgatgaaccctttggagcaaaaccatacttatgagtatcacaagagattgaagtaacaccgggtaatctaaaatcaaattcaaatgggaaaggttttttcattgccttttcataatatgcaacaacgaatgaacctaaacaacaatctacatgtaatggtatatcatatctaactgcaagatttgataattttggaatatcatcaactgtaccataagggaagtttggagctgaacctaataaaataactgtatttttagtaattaaacgtttaacatgatttatatcaacagtaaaagttttaggatctaaatcagctaataataatttcattttaaaatatttagcagctttgaaaacagcagcatgaattgtctttggtgcaacaatttcaggttcagtaatacctttttcaactctacctctttctctagcagctaaacatgcaagtaataaagattctgtaccaccagaagaagttgtaccacaaccttctggagatgcattaaataaattaagtaccatacttacaacttctgattccatttgacgaacaccagggaaagcatcagggtgtaattgattagatacagcaaatctatgataagcttcagtttgtaatttaattaaatcatcaccaccatgatagacagcaccagatattttaccctctttccaagagacggattttaaatgatcaagttcatctaactgattcataacatctttaaaacttaaaccatgatccggtataattgaatgattaacatgatcagctttaataattaattgactctctaatgaagcttgagttttttttatttccttttcaattttagatctaataactggtaatttgaaaacaattgaataaattttcttaataatataagttgtaagaaatgttaatgatctataaataccataaccataaacattttgaaatattgggcacagtaaatatttgtataaagtgtaaacgaagagaaaatctttaaatttaattataattgaagtattaaaataataaccagcaatgtattctctcaattcctctaacaggaactctatatctacatgagatagcatttattgagttttgataaactatacaggatatatagaatttaaagaataaaaaaagagatcaatcaagacattagatcacctgaattctatatagaaaagacggaaaaccggtaacattaattaaagttcccatcacatccgagggcataccttagtctaaaaagcactgaaattatttcggtacggactttcattttcactggggggggttacaatggagtaaggccccatttctaaatccactgttattgaggtaattatttttttattttttctattttattagtaatggaacattctcgtgtgattgaaatttccgagagattttcaggttttcaattttctatttctctaaaattccgagacagtggagtattacgtaatcagaaagaagtaaatttttttcactcccacccttaaacttttattaattagtcaacatgaaaattgatgattcatataggaaatatcgattttatcggatttcttttttcttttttctttggcttggtttctattcacaagagtttgatctttctttagtatccaggtatgtataatatataaatatgaacatcttgagatcaacaagacagttacaacatttgagggtgttttcaactaatttatctaaaagatcacttagcaatccaacacacgcgtctatatcgccaccaccttctttatttcaaaataattcaactaaacctttaaaatatcatgaattaatagaaaataaatcaccaataataaattctcctattgtacaatctgatactaaaatacgaaataatagtagtagtataaacacaaatataccattatcagaatctaataaactaacaatttctcaattattcataaataaatctacaagaggatcagttataaaaatagtcttatcattaggtttattacaagctattatattttttatttcatcaaatgctataatggatgaattatctgaatctgaatcaaaattattagaattatggggattttatgaacgtaaagatatttcacaaactgttatggcagttcatattggtcaattaagacaacaattaattaaattaggtgttaatcctgtaacaactacacaatctttaatggttgctcaacatttgttaagttttgatagagataatacaggtaatttattaatatatgttgatcctaattgtcaaatttataatttagttccatttagttatgaatatgatattcaaaaaattccaaaattaaataatgtcgttgatacaacttgggaagattttaatagtcacaaaaatattgatatcgaaattgaaaatgatattgaaaatgaaaaatcattatcatcaactgtagctaaaaaagttgtagtatctgataaagagggaaaagaaaagaagtagaatagaatagattagaaaacatatttcataagtattctattattaaaaaatcttatatacattttataaaaagcataattaattaataataccatttaaaggaatttaatggttttatcaataccatcaaatttgttctttcttggactataatgttccggagttccccccccccccccccccttaataaacaatagtttactctaaatgatacgataaacataccataatcatacactacaataagaaatcgaacaaagttgacaccccttgttacataatgtagataatataatgattaaatgattaaatcattagatcattaaatcattttataatatttaatttatgagaagcttatcttcctcactaatgcggttttaactatcttgaattgcggttgaattgcgggtgaaatgtcagtttttattgttttcgaccgtgttacctattgtatggaccgcaaaactgtaaattttatcggcgattcacgaccgctgtcaaaagattttccatgaataattgttgtgataatataaatttctataattattatattattgataaatataatgcttatcttatctattagtccgtcaaatagttcaactttccaatcaagtgataaggatttagttgttactagaaaaaaaatatatttaatcggtgatttctacactttctatttctgaaataagcttagaatttttattttttcactattcaaaaattaattcacaaatgagtatagaatctgttaatgaaaaagaaaaagcaagtgtcaatgtttcatccgtcgataattttgttgagttagatacagttatttcaccttctggtaaggttgttcatttagctcatgatgataaacatttagatgctgcacttgctttcgcaagagagcatggtagtattgatgtttcacctgaggaagacaaaaaagtttgtagaaaattagatcttatcgttatgccattattctgtttcctttatatgaatcaatttatggataaaacaagtatcagttttgcagcaattatgggtattcaaaaagattatcatatgaaaaatcaaatgtattcttggacaaattcaggtttctatcttggttatctttttggttctccatttgctgcagttattcttccaaaagttccacaaattaaatttgtttcaattgtcatcattatttggggtttagttcaatgtttacattgtactccaaaaacttatgctgctttcatgtttttacgtacattccttggattccttgaatctttcgttgctccaatttttattattatcttaaatcaatattataaacatgaagaacattttggtcgtactggtgttttctatggttttaatggtatgggtagtatatttttatcaggtgtttcatatggtttatataaacatggtgaagattatgcaattaaatcttataaaattttatttttaattattggtttgatgacaatagttaatggatttttaattttaatttttattccaaataagccaactgatgcaaaatggttaagtgaaagagaaaaggaagttgttattgaaagaattagacacaataatcaaggttacggtaataaagtttttaaatgggaacaagctaaagaagttttaattgatccaagaacttacttatattttttactttcattatcagttgcaattccaaatggtggtatttcaggttttggttcaattattattaagagtttaggttttaaaactgatatgtcacttttattaaaaatgccaagtggcgctattgaactagttggtttagttgcattaccattgatttcaagatttattaaatcaagaatggcaattgcaattacttatatcacaatcattttagtatttatttgtgttttagctttttcatctactaaatatgctgaattagtcggtttctggattttcggtgcttcaccttgtggtattattttaatcagttcttgtgttacttcaaatactgctggttttactaaaaagatgatcactacagctgttatgcttattggttattctgcaggtaatgttatcggacctcaaactttccgttcatcagatgctccaaaatataataaggctaaagcaggtgcagttggttgttattgtgctacaattcttttaatggctatcttaacttatattaatattagagaaaataagaagagagataaggcaagagaggcattaggagataaatatgtcgttcctgaaaatattgaatttgctgatcttacagattttgaaaatccagaattcagatacagaatttaaacttgctttttcttatattactaaatattttatttacttttcttacttatttttattctttgtgtatatatgaggaaatttttataacttttttgtaactggtgttcctcatatatatcctatataactaatacttatatcttcaattagaccaaattgtattgatgtttgctaactttttttttccattattacttgaaaaatatcaacactttccgcgaatttgttttttaaaaaaaataatagtatgtatggtattatgtaatcaataacaaaaaatgacttcgtttctatgatgcatttataacaattttaggacaacatgaatatcgatgttaatttcccttatcgggattttcttactttttttttattctatcattatattgagttgttgataaaattttatttttgttgataacggatgatataacattttaatagtctcaattgataaagatatatatatataatgtcatcttccatagtcggtgtaactagatcgatatctgcttgtaagcggtgccgacagaaaaaagtaaaatgttcacatgaattccccaaatgtaaggcttgtaaaaaagccaatgttgaatgcgtttccctagatcctgcaactggtagagaaataccaagaagttatattgttcatttagaagaaaaaataatagaattagagaaatttataaaagatagaaatctaaagatagatgatgcaaataatacccaaatagacttatcatcagtatcacaagaatcatcgcttgaatctgaaaacacaaaaatcaacaatagttcggatgaagaaagaaaaaactataaagagaacaagaataaaaacacacacgctaatgacacaagtatcaacaatgaggaactaatcaattctatcaactcttataaaaccacttctcaaaaggatgaatcctctgtcccgacaacttttagtggtgatgggataagtttctcaaaattgatgtttgccgctgttcattttaaagactcacaagaccaaaaaactgatcaaagacgaaggtcttctggagtttctaaaaatttagtaacaccgattgatcctacaacaagttcaaaatcatcattttctgaaaatgttgctctcttacctccaaaacagcaagcacttgactttatttctctttatttctctcaatctaattcacaattaccaatatttcatagagaagaatttttcaaaaatatttttataccaatatatggggaaatcccacaatcatctacaattgctttaaactatcctgaaaccgactggtcaagttttcctaaagttaaagaaaatgacacttggtattgtcaatacacacgtttacttgatgctgaaactgcagttgatcctgacatggatcctttcaaattttctgcaaaggttaatgttccgaaaagattcagaaagtcattatactttataaatattatatttgctcttgcaagtagtacttggcatttaaaattttcccatcatatatctgaaaacttcaaaaatgctgccttgttacatattgaagaagcttattcaagtaatgatagattagaagctctacaggcaatgttatcattaacattatattcattaatgagaccttgtgttccaggtgtttggtatcttttaggatcttctatgagattatgtattgatttaggcttacataatgaaagccttgcttcttcaaacatggatgcctttacaattgatatgcgtagaagattattttggtgctgttattcattggatcgtcaaatttgtgtttatttaggaagaccttttggaatacccgaggaatctattaaagttgattttccttcaatattagatgatgaattcattaaattcgactcaactaagaaaacactttatgaaaattcacctgcaagcaaagtgccttcgtataagaatatttcaatggcaatgttcaagattcgtaaattacaagctgaggtacagagtattttatatgataatagaacattacctagagagtttgattctttaactgattggacaaataatatgacaaaaagattaaaagactggaaatttaatatacccaaaacatccaaaataacaaactgtgatttttcaactgaattttttgaacttaattattatcacacaacaattctacttcatggtttatctcctgctaggtatgcattatcaaaagaagattttgtgaacgttgctgaagcatcgaagggtgttttgttaacttttcataagttgtggaatcgtgcggcgttaaattatacctgggcggtaacacagaatgtattcatgtcacaaatgagctttctatatgcagtattcaattcagaagatgtttttagaatcactcccttaagtgagatagagcaattcgcaatttattctaatcgaatattgaaaagtttgattgttaaatgtaatgcagctaagaaatgtcttgaagttttaactattttagcacgggctgttattaagttgaaatataaatatgaggaatcaagtaaaatcaacacttttaaaacacagatcagtaatacagatatggccaggctaccttctgaggaagaaattcaaactttacaagctggtggtaatgttacaggaaatatgagaaggctaattgttagtattcctgaattaattaattctgaagagaaaatgtcttcaaataaacaatctacaaagaggtccaaaaacaataattttggttatactgcaagattgactgctagtgagttaacacctcctcaacataaatcaaatatgcctgggattaatagacccgaaagcagacaatcagaaaatagtgacactgctgctgaatcggtgtggagtataaatggttttgatttagataacttctttgagagtgttaagagagttgagtcaccatatagttcaagatccataagtgaaaattcagtaaatgataatggaacctcttatattcgtggggctgaatcatcatcattatctgcattaaactcaaatcaacgtggatcaactaatgatgaaaaatattctttaattgatgaaagtaatacttatggttggaaaaatggcacctatctttctattccaactgcaccgcaatttatgggtacacaatttcaaagcaaacctcattctatcaattctccgataataggtacaatcccagattttacatcaataaatcaccctgtgccgttttataatatttcaactggatcaccaatgtactcttcatcaaatggaactcctgtgaatcaatatcaaaatattggagatgtgataaatccggtgaattttccacccgttaaaaatgatgaaactgctttgaataatcctacggggtataatgttgaaagaaaagacagtaaagaaggtcagagagttttcaagttgatgtttgaaacgggtacagaaagtatttgggatcagttttttgctcagccatttaaattggatgaaatctgaataatttatcgttaattttatctatatctctataatttgttctatatacatttttaaaaagtttagagtgtgtgtttagtccatgattttggtttaccatcagaaaaagaggtttcaacttcatcaacgattggttgtgcatgttcttctggttgtgcaggttcttcggtttctgatgatttttcgatttcatcaataagatcagcaggtacggttgtttctaacatgaatacttgtttaattaatccaacatgaacatccgggtcaccgtggcatgaatggaaagttgtatctaaaactgaatgtggaattaaagaagcttcttccactttgaaatctggattaacaactgcatttgggtcgtattctttatagtcttcaaaatttttttcctctaatttatcttcaattacttcaggggcagtggataatagttctgatggaaacatatcaagtttatccttcttcgatacaatttccggctctaaaactttctctgatataactggttcttttgcttcaactattccaactgctttttcagtcttagttgtttttgggacatattcttccttaggttttggtacaaaatttgctatggcttctttttcaaattctaagttaacatctttacccatttttctccagattgcaacaaagccaccacctacagttctaacaccaactttaggtctaacagaataaccaactttaccagttgatctgatagttgctcttctagtatcccattcctttaatccaccacctgcaccatctaataattgaacagttttttcatgttctaaatgtaatgaagtcggtatgtctaacttagatagtctttcgttttcttcaactattgcatcaattgcatcaatgatttgtgttatacttggacagaaaacaataataaaaccgtttgttttaacatatggagctaatttaatcatatgttcatgatatcctggcatatctaagaaaacacctgataagaatgcttttggttcatctgaatcatattcaagatttttctctctcttggaaactacttctctttcaacccaacttaaaccttcttctgaattaatccaatcaaatggtgaatcggcaacatggaattcaatatcatttgaatacatacctcttctaaaacctttaacggttcttttacctgtgatactatgatttttattacaatccacactatgtaagactgcaccacgtaaatttaaatcatcggcgtaatgtgctaatgcattggctggatgtaaagcttttgcaatagctattgacaaactgccatgacctgtaccagcctctaaaaactgcaacggagtaattttttcaccttcattttttggaggttcgggataatgaatatttaaatcagtcaatgacacgattgcttgtgcatcaaatgtgtaaatgggttgtgcattccgttctgaaaaattaatccattgctctaaagttggatgagaaactgtatatttagctaattttgagtgtgtttctaaagtatgaacatgaccaagaggttgctttcccaatacatcagtatgtttgatacttccaaagttcaaatttattttagcattagctgtatccttcaacggccttgataaccagtgttttttatcataagagctttttaatggtgtaattattgcataatcaccaggttgaaacttatttgaattaaaccttttttgagttataaaattatttttggttatcttacaaccacggatcatttcctctctttgtcgataactgatcgatgcagtgaaaaaaaattgaagattgaaggatcgataaataaaaatttcatgttttgcttaataaaatttgttttcttagtaatgcgagtaatgtgggagggtgtttagttttgagtaaccgatgaacctggggattctttagaccttggtgggtaacgtagatattttcatggccaaattggtggttagtgaattggactctattgtaaatgatgagaagaaaacgttgtgtcaaataattggaagattgattaattatgatgtatctgaaggaatttttactctggagagtatttatgacaaaagtagatgcaagatccatattgatatggaaactgagactgagaaatggagttcacttccaacatttcttgagggagaaattgttcaaatacaaagtgcaacattctttaatggttcaaatagggtgattatgtgtcagatgattgaatcaattaagttacctggtatcttaaatgataaatctgaaacaatattgaaattttcaaatcttaaataaataataaatttaatttaatttaatatatgtaaatagataaataagatattttgagcggtgtaaattacatgatatatacgatatttgaataattaactgagtaaagtgatctggagatatacatagtttaaaatgataaagcagcatgataatataaaggataaaatttataaagtaaaccaaataataaatgcttaaatttagaatctgaccttgcttcttctcttgtttttgagtaagatagtttgtggttgttcctcttcttcttcttcggattgttcttcttcttcttctgatatatccatttcttcgtcttgttcttctgcttcttgtctttgtttttcttctcttgctaatctcttttcttccttgattcttaattcgacttctctcatctttaataattctggatggctttctaataatttcttatctaatgcaagtgctctttccttattacctctcattctattcttatagaatgcacgttctcttctttgtctaatttcttcaattcttgacattgcctttaatgtagtttcaactaattctctattatatctgacaggaacatttcttctcttagcaaatgttaatgtggaatcaacagccaattctttaccagcagctttacggaaagctttagtccatttaagttttctaggatttcttctttgtttaaaatttttatgacatttggaacgacagaatttgaattcttttgcatcattacgtacaaaagttatcccatgaccggggtatactggagatgaacagaagtgacaagcgtaaattctcattgtttgataatgattcggatacctttagaggaactcaagatgaacagtatatatcaaacagttccagttacaatgaatgaaaaattttattttcctagttaagggagagaaaaaatttaaaaaaaactttttatttcctaattggggattttcgcattttctcatttatttttcttgtttttccactttattaagattaatccagtgggaggaaagaccgttgtgttgaaatatacaggtaactgtatcttcttgagaagtaaggaatagcatcaccatgagctcaattgaaaaggaggcagggtctctagagactcagagtattattgatcaactctctttacaacttttgcaacagactgaattgacaaacactttacaatctaaaatcgctgatctaaatagaatggcatctcaacaaaagcaacaacttatcaacgctcgtaaggagaaacatgatgccgatcttgaagttatgagattgtcaactgaagttgaaaacattactcaagaattgtttgaacaagctaatttacaagttaaggaagctaatgagaatgctcatgatattactcaattaaatgatcgtttggctcaaacgataaaggaaaaggatacaacgatagaaattttacaatcagaattaagtaatttaaaatcaattatatcaaattttgatagtgcagctaatacacctttaagtgaatcccagaaaaatttatcaacccctaacttattatcccactcgataactaatgataaagaaggttttgttactgccgattctccaacacttccaattgaggcgtgttttaattcaacgttactaacacaatataatgaacaacaaatatattcaccattatataatcaattaaggtttgatttacctgctttccaattgttcagttcagccttaatacactcaccactatcatcatcgacacattctacttctaaatcatttgatatgaaaaccagcaaattttttatcaagttattagatgaattagatgattgtttgaaattagagaaagctccagctttacaaactatcaaactgcgttggaataggaaatcattcttacttgatttaatggaaaaaacagttaatattgaaccattgagtgctgcaactgaatcatggaaaaatcaaacattacaaaaatttataccacaagttacatcaaatccaccaactccgataataccctcatccaatgaaatgccatcattaagtagatttgcaacatctaatacatcagtatcatcatatgatccttcgatgtttaaaaatgctaatgtttcaagtaatattacgaaagcttcatcaaatgctgcaccgttggctgttaccgcatcatgtggattgtgtggtgagaaaagaaaagatatgaattattcaagattatatcatttacgtatattatatctgtcttcagaaaacaatgaagaaaagcaaacaaaatctgattatcctttatgtatttattgcgcaaataaataccgttcagttgttgaattattgaaatttgtttccaatataaatccgattaaattggctaaaggaacagaacttgatgattatattagaagttcatggataaaatatgttaatttaagagcaaaagtctggtttactacagagattggaatatggagtgaaaaggaaatgtatggattagtatatggatggcaaaataattggttgactaatttagctcccactttaaaggataatgaagaaatctcaaataatgaagatatggaaagtcaaactcaagaaaacgaaattaatgatgacaacacttcagtaaacgaaacctcgatggctgaaacaatagttgaaacagtagaagtggtatcagtcaacaaatcattggacactaatacagattcacacgataaccgagaatcagaaccatcatcaacctctcaaacgagtagtaaaagtcataaaggatgggacggatggtccggagtcattgctaaaccaaaatctgaaatgacagttgatgtaggtattggtttaataaggaaagtgagtaccaatagaaaaagccagcatatagaaaaggaaactttagatacagaagataataaagaatcaactgatattgatgaacaacctgctagtatcagcgcaactagtagcagtgaagactttcaagatgcaatagcaatctcctctaagagtgattcagttgaataaccttagaattgtgtagatgtagtggatgtaactgttatagcttatattgcaattttatgtaatgaaatttgatcaagtgtaataattattttgtgatggcgtgaatttttaattttaaagatcctgttgaagaggtctggataagtgttctgtttaacatctttcttttcctaaacaaatcaattgattatgcctgacctagtgttctcatctaaatcccttttagaaaatttgggaaaggaaaactatcaattagttgatgaaactatagaaaatgatgagaataaagtttctgacgaaacatccggaaacactgaccaattcttattatcatcaacactgaacagtgtgccaatagttccaaaggatgctaaggtatcagaaacgagtgaagctattgaaaaagaaagtgaggaaactggtgtggtgagtgacattgcatcagtagaattatcagatactgattcaatttcaaatggattgatcatgactccaaatgaaaatataatcaccccagtgaaaagtaaaactttagaattactaaaaatattaaatacatccaatctccttaattcacatgatctactgcttgcttcttattatgaagaacataagtacgatttgattacacaaaaaaggttaataatgcgtgttataacctggaacttaaatcaaatgaaaccaccaaacttaagggaattggcaggtgaatctggtagggaatgggcatccttcttttatgcaggtgatgaaactgtatcaaatgaaaataaggaaggtcttgctgatttatattcaattaactttcaagagactatttcattaaaatcattttcaaaatctacaaatgcaattgatgaatgggttgattttcttttacaagttttgaatgcgatttcacctgaagaatatactgttgtttataagacaggtttactagcattgacaactattataatagcaaaatgtaatatatctccgaacttatcagagaatagagatgggcaaatacataatatcagagagaatacattaggtttgggctatttaagatgggcaaataaaggttgtatatctgtgcgattcagagttggtggggtaggaatagatcttttcaatcattataagaatcaatcaatatcaaacacaccaaaacctagaattgatagtgggtacaaatttaatgaattggatgaaactgttggtaaacttcctggtgtggagattcaaatattgaatgtgcatttggtacatggtgaaaatgctactcaagtgcaacaaagatgggattcatgggccaaaattgagagaaaaataggtttagatgatcgatctgtcagtttagcttttgacccatcatcaattcaaagcaaagattcagcacaagtgagattggagcaaaaactgcatgcttctttgaatgtcaaatctaatgttgattattctaactatgattcatattttgatcaaggtatggctcatttaagtttaaataacgatcttccaaggacttcagaagcaccttttgtattgacagatatagagaaaacaaaatgtgaagggaagtttacaccaatagatattaacaaattcaaatatgttaccgaggctaataaagcaatagtagtatgtggggatacaaactatagattttcacttccaacttcatctcaatctagtgttcaacaacttattgcgtataattcatggaatgatttacttcaacatgatcaattgaaacaagaaatgagaaataaaaaagttttcataggattcagtgaacctgaaattaattttgctcctactttcaaaataatcaacaattctaatggtaaatgggtcaaaatagatactagcaaatcacaaaataacgagaacaaaaatacaaataatgaagaattattctatttaccaagatatgatactaaaagattaccggcatacacggatagaatcttgcatgttgaaaagccgtactttgaaaatgtcaaagattcatactcatccattactactaaaggttctgatcacttgccagttgcctcatcttattttatagatgcaccaatagttgatgaggataaacttcatctgctaagaagcaagtttaacaaagcatgggatgaaatcattaataaattggtatttctagatatttatgagataattgaagttaatcattcaatgaagagccgtgctattaatgacactccaactgcaccagttactcaaaatataaatatgagaggtgggagtttgaaactctcatgcattgttggtgagacattgaacttaacatgtcaaattgaaaatattacagatgaggctttcaattttatagttagggaacagacgaatcgtggttggtttggtaccaaaatattggtcaactgcaaatcaaagaggtattatcaagaaagaactggatctgaaatgcaacttcaatctaagtctaaaggtgagattgttttctctttaacgccgacatcggtaggagttttagagagaacattttctattgaaatacccgattataaagtttgtccggcttatattcgatatattgctttatctatacgtgttgaagatatatttggaacaagatttgaatcaatcaatgaaaaacaatttgaaaatattttaagctgtttcaaatttattatggaaaattcatccaactttttactagcaacaattgaggatacagttaatacagataatctaacctcaattggttgggatttagtaagagaggtatctctttgggaatttgataaagctaaatatgaaaaacttaatatcagtggtgaaaacttgttaagaacaaacataggctcaattaatgtcatggcatttttatttttatggttgaaaagccaaagctcagcttttaatacaacaactaaaagaggaaaagttattttttcaaatgttttgaatttaatcaaatatcttaaactagatgtatcttcagcatatgacgtgtttgggtggctgtttactgatgagtatgaactgcacagttatttcgacaaagattttgatataaagctagagttataaaacctaatttatttttatataactatttatttacatgaactatcatgttaccataacatcaagtaatctattacattcaaatatatcaccacttgatacatctaacaatttaaaatcgtaaatattgaaaactccacgctctatacttaacaattctagttcacactcgtaaagattaccatattctaaactaactctcaaattatttgtcaaactcaccaatccagctctattaaatttatagtaaaagcttctgataagatggttgttggcaaataacggaactgcatcaagtttattaccggactgtataggaattggtggtattgttttttcatattcctttttaattgaactttgtacatacagtattaaatccatcttgttgctggatttatttagcagctgaattttccatttaaaagtttcacctaacttaaccctagtaggacctgtaacagtaactactaatccacgttgaaaagtttgagatgtcgtttcactccacaattgactaagtgaaatgttagaacctgattttaacttcacacttgtatatcgtttacctcctaaaacactattacctggaattttcgtatttgctgtgacggatgctgttgaagaggagcggcttggtggggggagttttggggtatttttactatgaattaagttgctgtatgtacgcagtttcgataactttgcagctggtagtagaccattcttttttaggcttaaagagcttgaattgttattactgactaatgagcctttattaaataaatctaagtttgacgaccatgttgttttcacttttgtatgattgtcaactatggattcaatttcaacttgcaatggtttggttaaagatccatcggcaaatagaatgtaataaacaattgttaaatgtgagttaccatttagtacaactgggaaatctatgttattgcatggtgtgatatcacaattgactgaagttatgtttattttagttatttctatacttgattttgaatcaattacaacttttgaagcacctaaatcaagccatgctagtattttctctgatttatatgattttagtgacattttgaataatgaagaaatatgtaattcggtactgtgtgtataggcaatcaaagagttttcattatcattatcgtcattattcaattgagtttcactcaagcagctattgctaactaactcaatcccatccaattgaattaaattgacctcttcaaaaggtttgagattgttgtttatctttactgtattttcaaatttgtagtttgcacctactacaatggttgaaaaatttctactaggtactactctaaagctatgtttccatattatgatattttcctcttttaagtatggtgtgtccaaaatttcaactaaatcattgactccgtgacttttagaaggttcatgcatgtgtgatttttcatctttatactttatttcaaaagtaagttttccttttgttgtttgctcagatcttagtacgatatagacaggtacaatctcatcaaagtagccaattgctttccttctttggttttccagttgctgcaatattgtttctgcagatggttcctcagattgttttgggattgtttcactattatcctgatcatgaaatacagaaatgttttcaaataagtcatattccggtatgtacactcgtattgactccatttcttacctcacgatgcaaccaattaattcttttatcaacctcttcaaggtcagatcattattcagtttcaaatcacaaatttccaatgtcaaattttccgttgaaagtgttaatccagccaagattcgcgcactatattttttttctcttctcagcctcatctatataacgataagtagtaatactccaccacttagcaattctttatttaaacaattaaaataaataattatatgtacaaaaaagttaaaataaaatgaaattataaatagatgaaaatagcaaagatattatgagcaaattaattgataaatattataagcaatcaaaagaaatcaattccagaatttttatttcttccataaagtgacaaaagagctgataatttattatcgttgttggtgtgccatctgagggctgggtttcttaatgttttaattaatgcaccacgtaaagcaagtttgtaactagaattgcagctaacacctaatatagtagtttttgatccattgaatgctgaaactgtaacattaaatacaacttctccgttttcatcaactcgagaatctgaatgagtttttaaacggttgatgtcattaagttcataaaatatttcctgaatctttgaactataattccagatggctttttgtctttctgtggagatatattgattaatatacaataatatccattttttcaaatccctacatctgtatggatctaaacggttagaggaaatgtatcttccaattacatattcacattgattgttaccattgtcagtatcgtcaagtaaacagaggtattttggtagatgtagaagtaatttttttttaaaattactttggtaaatattacttctcaaatgagttagctggttttcatttaatgagggattagattcataaaccaaaaatgaaaccaaaaatttgatggtagctttaccaatggatatcatgtttctattataaatttttgttctactctttcccataatagcttctggcactcttttgagatgtaatatatttgcgcttgtaattttgtactccagaatgttaaatctggaacgttttcttcgaattctactacataataaatcatgcatccaatgcgttgcatttatccactggttaacatttatttcactatctaagcaaaatatactcaagcacagtgctccaacataagattcaaatatatcagcatttatttttgagttttcatcaatttcagtattagttagcacagaattttgaaacaagtaaaaattagaccaagtgcataaattgtcattagacaatacataattccttatcacgttgatacataaatctggatattttttttctaatattattgtaacaatgaactctaggaatgcatctcctaggaactctagtcgttcatagtttttcccagttgtaccatcgtaggaggaatgtgtcaacgattgagtttttagcagtggatcgctcaaatgtggaagtttgggtagtagaagtgtattcattgtgcatttattcactcggtggaaatattgataataactattaaatattcaatgtcaagaaaatggaatagataattgagccattgtgtcattagaggttttaaattaattcatgtagctgagccataaacagaaaataaattttatttattacgtaataacttattgcaaggccccattttctggtatgtaatcgatgagttaaaagcttatcatgttataatcaatgataagtccatcatattgccaatcaatcaaaaaatgtgaattatactgaattttatttacctttcatttttctcctgtgtagctttttttccgaaaacaaaaaggtcggatcaatcaagcgtgtatttttacttttgataatatctttctcctttctcttttgcatgtaactagtatacagagcattaacaagagattcgcactctaaccatccaattttgaacatgcagtgattatatttgttaatcgataatggtaaatatgttgaaacgagaaatccaagatattgctttaaatatgatgatttgaactggaaactgatatcttgttttctttttttattaaacagactataaaattgagaaaagtcaggcgtttccagcattttcaatgcttggtttgttaccacatcttcttttagtccattgtccctcatttgagctatttttttaacatcatatgtggtcatgttattgatgaatacttttgtaaacaaaaatctaagtgctgaagtacctaaaaactgtagtctttcaatttcaattgtcttttcaaaatcattggaatcagcattgaaaagtgattctaaatcatgacgagaattattcttcacttgcattatgtaacgatctgtatcacttattactcttgaacgggtattctctctcaaatcgtaagatttaaggttctctgtacaagcaatttcaaaaaaatatgtgcttaatttccaactatcccataaactgtctttgaaacttttgtaatgagtacagataccactttctaaagcaacgacaccaaaatatgcttcaaatatatcagcgtatttcttagaaccaattggaaatgcactatcaaattgtgtcaattgatgatccaaacacattttacccaaattcttatttgatgttatatcacatgctagatcaactaagtctcttttggtcaaacttggatatttatcatataaaaatactgatacaatgaagtcaacataagcatctcctaaaaattcaaattttttaaaattcattgtatctttcatgttttgaacaatacttaaattgttcttgttttttatttgtggtaaagtgatggaagtatgctcattattaagtgagcttgatttgattttgaccttttcagacattatcaagtaatctacttcattattttcataatctctccatctactgtatcgtcttgtagtaaatttgtgaccgaaccacaatctaacatttcgtagatacatgcagtgatcgctttgaaaatcacaagtaacttaactcatgttgcttgttttttatccgttaaataaatcaattttactgaaaattaaaaaaatatctttagcttattacgtaatagctattatatagtagatctacatgaatcttgatatatacgcttactagtgttaatgttctgctcttgatggatcttcactatggagtatttgggtatttgcctgggtatataattgtctgttattttcctgtgatagtgatcgtttagcaaagatatttttcccttttaaaatttttttatagttccattactaatatttttgaggtttaatgttactaggtcgttatcttaatttgttactttttacatcattaattttctcaatttcattttccttatcatgtcctatactaattgagtccattatttgatttttttcttttgatgtgtagaaagaaaaagagtttgaatgtttattcttccttttggtctcttggttaactttattatacatatttcccaaagattcaaatgagtgttctggctttaatatgatactcttgcctcttttggacctgtttttcaacttcattccagttaggtttgttctgctttgaaatgtctcattgttatcttcagatgaattcaatttttcacttaatgttatactttcgcttcttcttctcagctcgtcgtggttatagcctggttgagtattcataagtcttacttgagatgaagaaatatttttccttggagatgaattacatgatgatgacagtgccttgggtatctttaactgagctgttttattaatatttgttttgaaaacaacccttgatttaagaatgcttatatatttgtccatggcacattctactgcatattgatccttaattaatgagattctcttccacgtggaccttgcacctttcaatatgcatttccagataaattttggtgttggatttactagtgttttagattgttctccaaatcttagctcaggcaaaattgttatgtcaccaatataggattgtagcatcagttgtttcaattttgttgcaacattactcaatattcctaattctgtgaatacctcacaataatgtgaaatttccaaggataaaatgcttgacatatcatataacaattttttaaaactccaaaaattcccactgtctactaattctttacaatcagcagatagtttgaccaaaggtgatatgtgaggatttacttgacaagcaattgtatgattaacattaaacatctccgaaagtctagaaattggtaaatctgaattcaaagacccatcaacgaatttcaatgaagaatttgaccactcaactatttctcccgtttcagtatttttttcatagatagcagaagatgcaaaaacaatcggaagagagcaacttgcacaaacagctgaccaaatcaaaacattgggtgatgttaaataattaagcaatgtaggttgatcatgaacagttgctggagatacggttatattaagaattctacccgttttattgaatgcttctttgaaagtaatacttccaagaaaatctttcatagtttgttgtaagttttttccatcaaaccagactccatatttcaataatcttgataaatgagtataaaaggtatcggtgtcattttctatatcaaacacttcaaacgtatggtcaaataaaccatctaaaatttctttaatttcatcacttctttttgaacacattacggaactaacaatggaaccacaacttgagcctgatacaatctttggaaatagattcatttcaagtaatgttgaaaaaactccaattccaactaatccaaatgttcctccgccactcatagttatagccgctctaccgtagcttctttttgattcctgtagtatttccataatataagtgtcatccaaggggcacttttcagaagttaaaagttctaaacattgaacacattcctcgatatattcagtaataagggttttggttccaatatggcattttgagtataacttgtgattattaattccggcaaaatcacgtttccagcatgttctaatgatatacaacaatttctcgtaatcatcattctctctgcatcttctcatctcacttaactgtttttcaacagcttcgtaatcgtaaagatctgactcttttatatctttccaaagattattattttccatttcatctaattttaaacttatctccaaccattcgtcatatgtaattgccattgattgaagtcttcgtagtttttttatttctaatagtaaaggatcatccttaggccatccaaagaggttttttatccatgatgacaatcctgggtcgttatcttccgatatattaatattatctgtttcacgacaacaattatcatcaacaggtaaatgaacattaattcctaccctttcagcattacctaaaagaagttttgctgtgatattttcaaatggattgttgtgcaagtatgtcaggtcataatctgtgaccttttcatccatgatcttgccaaaagaagtgtctcataaaaagtgcaaactatcacaggactgaaagttaacatatatttttgaaccagcccccgcaaaaatcaaaaattccccaaggagaatttctttgttggagataacagaatttcatggtgaactaactgagatagcataaataattatattattatctagtttaaatgtaataaatagtggtagttgtaaggctacatgtacacaaaataattttttctaatttttatttaagagaaggtcaatctttgcttcaagtgcttgtaatctctcatctttggcttgattagcaagtactaatttttcaatattagattcaagagtttctactaagttttgtaatttttctaagtttgctttcaaaccaccagcagctgcaccgggtttagcagcagatgaaggttcagatttaggtgtctcaactgtagaggtttcgatttttggagattcagctttagaagtttcgacctttggtgtttcagctttaggtgtttcaatctcgggggaagcagccttaggggtttcaaccttgaaagattcagattttgaagcaccactggatgatggttttgagttccattcatcattatcatcgtcaacatcttgggtatcatcgtcagaaagattgtttactttactcagtaaactgttgactttttcttcatgtaacattttgtcaacaccttgttcttgagtcttggtgaaaactggtcttgcttcagcaactggttcttccttcgtgatttcctttttagtttccgcttttttaacttcttgggtagtttctggtttctttgcttctggtgcagatacttcagcgggtttggattctgataatgaagggcttttgacaccatcataaatatctctcatagaacataatattggaccattgactgttttaccaccaaaatattcatttgctgacattgcaggttttcctgctggagcgtctgggtagatatcatcttggaacatttctgatcttctaggaacaataaaagataatggttcaatagagttatcgtttaataatttatacgctttaacaatttcattatctttaatgttaacgaacctctttggtgagacagcaaaaccacgttgagctccagttgatgggtattcacctaaaagaattaaatcatcatcggcatattcaaaaaatctaacattaccgtcacctttaccagcaataaataacatattggtagagtcgtcatagaaaggcattaaggtaccagaagatgaatcaattgagataaatccacctccaagagcacctttagcaatatcgtcagaatcccataaacctaattgtctttcagaaaatctatcaaaaccagtggtagctaatctattggtgttacctaaccaagtgattcttgatgatttagcacccaaatgaccttgaccttcggttaataattcaccagatctgacatcccaaactctgatttttttatctctggaagtagttgcaatctttgtaccattataattaaatgcgaaagaggtaattagatctttatgttgtaatgtaatcttacaagttttagtagataaatcccaaattttaactgaataatcgaatgatgaggatgccaatacatctttagcaacaggattgaattgtaaatgaccaactttacgagaatgaccaactagagatcctaatggttgaacatcaattatgttttctgggtcaacattgacgtatgaatatttttctggtatttcccagataagaatcttaccatcttcacctgaagagacaattctatggtcatcgaatggatcaaaagcggtatctagaacagaaccaccattgtgacctctgaacattgggaccttatcaggtgcttttccaacttcatcaactggaataacggtgaatgaaccaattccattggagtttaatgctatatataaaccatttgcttgaatgatattactatcaaaagctgataatgtaggctttaagttttcgtaacagagttctttcttggttggttgaccaaacacgtgtctaaacttggatgggcggacaaatttactcataattgcgatgaataaagaacaaacagcaaagaggttaagattttgtttgtttgttatcttgagaccatttgttaatataattaaatgtccaagtctaagacgtcgataccatacaaaaccctcagaacgcgattccttttacaaaataaaattattttttggttacatgttttttagaggtgaattgtacaaattgccacactgaaaacttttaaccatcgagtttatatctcataaggttactcttaaataataaagtaaccaataaatattaattaatatccatggaaacgccgaagaacgaggtgtggaaactggccggatcaatagctgatcgaatttcccaaacatacacggaaaatgatccaggtttacaagaatcagttgttgaagaatgtatgcagttttacctatccatttcaagtgatgatacaactaaatcacacatgttttgtaaatcacaaacatcttcaactgttatctcctttttaattgtagttttagccggttttgatgttgattttgacaacgaacaatttattcctatccgtacgtgtatagatcattgtactgattgcttaattcagtatcatataaacagagcaaaaataaggaaaaattttatattgttgaaaaaagttccttatggcagtattcaacttacaatggaaaaaccatcagtctgggaaggtaaacatttatacaagaaaatatctaagtcaattgaagataaattggataatgaatcattgaaaatagtactgtcaaaaattttagcagaatgtttattaaatcctaaaatactaagactgaatcacaatttgaaaacatattttgaccattgtacaactttcttaaattcagctcataatttactacacgaaagaaatatggattactatccaggtttggtttacttactgttttcagagaatccagatcaaagaaattgggctctatcaaaattaccatatgaaaaactagatgataatggtaaaccaataacagattacatgaataataatgactttaatgatttgctagttgaagaatacgaaatacatttctttaatattcagaaacctgatttcttctcagatgataatgcaatcaagttttggactaacatagtttctttggtaagatttaattcaattgatatgataaaatcagtggtatgtgaaccatactcctctgcttcatttagggatgattccaaaataagaattgttcccctttattcaatatttatcaatcatgtcttctcatatttggactcacctttaccatttctacttagatttcttgctatatcactagaaagactcaaaacctatatatttgaacttataaaaccacacaactatatgagcttttttgatatggcatttaacaatcctgcttataaaaaatatcttatacagttagctccagatgttttccctgattctttatctgaattggattctgcaagaacagctttctttgttgatttggtaaaatggatggaagtctgttctcaaatattgaatgattctaataactgtcagttttcgattgctatatttggatttttaactgattatatgaaaaatccgaattgtggtaaatttattggtacatatgttatggagaatatgaatactcaattgactttgaagaataatatttacagtgaaaatatatttactgagatgacatataaacatagtgcaagaatgttggttgataaaaagtgtattttgttgtttgatgcattaaatatcccagcattggaaaaacgtgcaattaaattaattaaaacaagtttggaatacgatatacaatcctacgcttactattcacataagttaaacaacaatcaattgcttactgtcccagattttcatccagatctatggaacctaataaatgtgaaaatagcctcaaataagaatttgtcaatgaatgttttcaaatcttttgaagatataattaatgtttttttgattgatgttccatataaaaagacaaaactatcaatagacaaagtatcagaggaaactattaaaaaaactgtccttgctgcaaatagacataataaaactgtgcaaaattttacatcttcaattgaaaatatcttggtaaaattatctgaatatctgacctctactcaaatgaaattaattttggcagatgaggaagcttcgtttggtttttggtcactaatcatgtctccagtcgataaaatatacgattcatcgattgctttgatgaatgaatcttttgatgttgatgatagattagaagcgttcaaagaatgtttgaacttaaatttgaaaacaactttgacttccttcaaacacgcattatctaaatttactctattgcaactgtttcttccatcccaaagaattgttaaagtgttgatggatttcatgacaacattatttgatccgatgagtggtaaattaatttctctgaataatgaagtttctgtggaactgaaaacatcaattattgagttttggtccgacgtttggtcatttttgggaatgatttttaaaaacatttttaattggtctataacttatgaaaaattgaaacttacactaccaaaggatatatctgagaaaatctcttcagatttgttgaatttcactagagatgtattagatctttcccattcagttttgaatggtttgaaaattattattgctttgttaaattttgaaaatagttacaaatcaaaagaactattaataattaaagaaactttattaaatcctattattgcaactttgactgatttatttaaatggttaagattaagtgatgctgctttattgattttatgtgttgacctaataaccaaaatattagatttatctacagaagctggtattgtatttaaagacgataatctaacaatcttgattaaattatgtttaagagctaagaaattcaataataaaatgaatagtgagcaaactggtgaattactattacgtgcaagaaaaatgaatgataaattggttgacaccattacaattcaagttgaggatgaaaaaatggcaaataaaagatcaatgtctcctgatgttaaaactggtggttacgaatatacatctaggaagttggcatcacaatcaacattaggaaactatctgaaaccaaacattagagaagttccatcatttgtccctcctaagagattatccaagttagagctagcacagcaaaaattaaatgaaaaaagaaaattacaatcaacttctgcctctgttgaaccagcacctgcaagaccttcaggttacaataattctaaaaaacctattaaaattggttctgatagtgaatctgataatgaagattcagataatgaaaatactcaaactggtggattattcacaaaggagcaagttgtggctaaaatgaagaaaacaaaagctgcattacaatcactacaagctccgaggtttcatactgatatatgtggtaaaaatgaaagaactgaaaaacagaatgctttattgaaaaagaagcaagctgaagagttgatgagattgagattgaatgttgatatgaatccattatataagacaattttaacttggtcttataacaatgaaagtgaattaccttctgattatgatgagtctaaatatttcccaattaaaaataagtttgattcagtttcagactatcagaaaagttttgaaccattattattattagagtgttggcaatctattcaaagggctaaacaaattggagatgaacaacctttccgaatgactattggttcaagatctgccacagatatgttctttgatatttatgtttcagttaaaaaagaagttatcaatactgcgcgttgctttaatgacaatgatttattggttattatgttagtagataatctaccttccgaggaagaaaatgtaggtattccaaaaagattgattaaaaatgcaacgatcaactgttttgctaaagtccgtgaaattaaaaacacaaatggtccgttttgtgatatcactttaagagtttcatctgaaaataataacttagtacataaaattacatcaggtatgacattggtcggtttgaaagttaatacaatgacaacattagagagagagttttcttcattggaaggtttgaaatattatgatctaagtgcggaaattataaaggctgtgccagcagaaatcgaagagcctgattctaataaaattaggaaaattaaaaatgtttatgatgttaatgattcacaagctagggcaatatctggtacagttcaaggaagtggattttcgttaattcaagggcctcctggtacaggtaaaacaaaaactattttaggtgttattgggtactttttaacacaagaagataaaactgttcatcgtgtgttggcacctggtgttaaggatgatggttcaagatctactaatttgagttctctaaagggtgatataaataataaaagaaaaatcttgatttgtgcaccatctaatgcagccgttgatgagttggttttaagaattagaaaaggtatcaaaaactctaaaggtgaatttttcaagcctgctgttgttagattgggcaagtctgatgctatcaatgaacaagttaaagatctgactttagaagagcaagttgataaacaattgaccaaaatgagcaataataatgatgattctaaaattagagaagaacataagaagtgcattatcgagcgtgatgaattgagaaaacaattggaaagtggtaaattacctgaagaggaaataggtaaaacagaagtcagattacaagaagttatggttagaagaagagagttaggtaaaagattagatgaaatgagagaacaaagagcagtcaactaccgtaatagagaaattgaacgaagaaatattcaattcaaaattttgaataatgcacaagttgtttgttctacactttcaggttctgctcatgatgttttggcaggtatgtctatgacttttgaaactgttgttattgatgaagctgcgcaatgtatcgaattgagtgccattattccattaagatatggatgtaagaaatgtattatggttggtgatccaaatcaattacctcctactgttttatctcaaaaggcagcatcttttaattatgaacagtcattatttgttagaatgcaaaataactacaaagattcggtgtacttattagatgttcaatatcgtatgcatcctgatatttctagatttccatcaaaggagttttataaatcaagattaaaggatggtcctgacatggctactaaaacagctagggaatggcatgtacaacctatttatagtccatacagattttttaatttgagaggtgaacaggttagaaatgaaagaactcaatcattgtttaataaagtggagtgtagagttattttggagattgttgaagatttgtattttaaattcccaaatgttaactggctcaataaaattggggttatttccccatataaggaacaagttagacttttaagaaaaacatttattgacagattcggtaatttaattctgaaacaagttgattttaataccgttgatggtttccaaggtcaagaaaaagatattatcattttttcatgtgttagagctgaaactaatgcaggtgttggtttcttagcagatattagaagaatgaatgttgcattaactagggctagatcttctttatgggttgttgggtctgttgatgcattagtgtcaaataaaacttggagagatttgtgtcaggacgctaaagatagacaattgattaccgaaacttatgttggatttacaagaaaggtgacgaaggttatcagtgataaagatgccctgaaaactgttgatgagaagaaagaaacaagaggcaaaattgagaaccttgatagtattgacagtagtgaaaagaaggataagaagaaaaagaaagaatcaactaaatctggtattattactcaaagtagtgatgataaacaaagtataaaatacctcaactcagcaccacttggtaattcaaagaaaaggcaagctactggaattgaacatattgatgtcagtaaattaagaaaaatatcaaaaaatgttcaaaatgttagaccaattcctgttaaaactagtagtggacaaatttcagctgatctgagaatgacgaaaagttccaaaataacaccatcggcatccggagtaattatgcctaaaaagaatattaaagataatacacctgcaggtatggttaaaattagtaaaccgaaaccatcttatatgttacctaaggcacccaaaagagattaaatagcagtttaaaattaaattttatagaaaagaatatattaatatacagcagtattgtagaatgaactgaaggaattaatcagttttattgccttttgaagttttgatttcactaagcaacaaatcatatttatttgtgtcaggtttaaacttcagatttttctttattgaagattttggaataacaactgcattggtgtttgtaatacctggtggggatgttgatatacggttttgtatttgaagtgattgttttgttgcattgactaattgtatgttttcgttagagctttcgtaatgattatcactattatcattatatatattgggttctgttttttcaaataaatcttctgtctcatcgggttgtatctctatattcagtagtttcatggctttttctattgcatctagttcattcaaaatcagtgtttgaattggtgataaattaaatgatctagcatcttttattgaatctttcaaataaattctactggtaattaatgttttctctagttggggtatattattttccaaaagaaaagtctggattgtagattccatattctctaaagtcgtaaatatattagaaaggtataatgaagagtttttaaaattatccattgaatttaagttaatctttataagattatcaaaaaagtccaaccgttgctttaacttactagaaacttccaaatctgtcaaatttggtgaatcaatctgctgagttttaaacatcaaattgatctcttctttctccattattgataaagattctaattcgtcattcgtactattgagttttatatcaagtaatgatttagtttccaacaattgaacatttagtaatttcttctttttcttaagaattttcaactgagcttctaaattgaaaatttcattgtcaagtttaattaagttctcctctagggatgtgtacatttttccttcttttgaattcaaagtaatctgggaaattttatcgttcaatttggatttatcatttatccaatttctaaattgttgatatttatttaaactaaaatatttttcacttgaatataattcattgattgctgtaaagttctcgttcatttcagatattaggtttaaaatttcatttcttgtttgtgaaagttttggatctccagattgtaaatattggccatgtaatttcactaattgaggtaaacgatcatatagcagtatttgttgttgtctctgcaagaaaattattggctctgcatgtgctggtgatagtgatgtgttttcaatatgactaattttctcctgattaaaaagatccattattgatgaaactgtaggccaacctttgcctgattttgacaattcgtcatttgaatctatccctgcctccaaaagagacaatttactaaactgatctgtctatatatgttagtatctcttgctgaattatgtatataactccaaggtgcaacagtacataccagaattcgacatttgataaaagaggacttatggggcattgataagaaaacttgtaacataatgatttccttttaggtaacatgtaaattattctgtaaattttttacctgattttatattaatacgtagaagagaatcaatgatatacaaaggatagtacatgatataaaagcgttgtctatatcttatctgtaagagtaagtttctgtgtaatatctgaagatgactcaataatctttttaaattctgcaaaagataactttccatcaccatctgcatcaccttccataatagttctatctacaagttgttgtaactgcacatctgtaagtgaatcggcaaccattaatcgaagtacaataaaaagttcaccattagaaatataaccatcgccatcaatatcatagactttgaaaaggaaatgtagtttatcatcgactgatcctgatgatgaaaagactgaaagtccggcaacaaactctttgaaatcaacatcaccacctttatcttcatcaaatatatccatcacacgtctcgctagtgggttttgagagatacctggaatagccaagaattcgtccttgtcaatagcaccagaattgtctgtatcaagtttcatgaaacgttttgcaagtctgtcaatttcatcggaaccaaaactagttccttcagatagatcttctagtagactagatggaatgttacccattgttgttgtggttgttgtggttgttatcagaagacttgaacagaacgtcagaagatgatataggtttagagaaatacgaaatggattacataatactatcttcaaaggtaacgttatttaatactactaaacatcatgtgatgttcatgttttaaagataatacagctatttttgatgaatcgtataaatacgataatgataatgatgatatacacatcgtttctataaaactacactccggaatatcctcttgcaatacctgtacgaccttcttcaacgagagcaccctctgtagaatcttcattagtaaaatcacttccaagtccggtccattcacgagattgaagattcattgcagacatcgatacggtattacccattgaaagagttcctgagaatctttgcactaaagcattttcatctcctttattggatgaagaggattcactctctaactcaagttcaagatgtcttaattgacgaagtggttggttcatctttaatttacctgtaactggatcaaattctggtgcataatcgtcctcaacttcttcttcgtcagtcttttcagtaattaaattctcttctgatttttcagattcattagttttttcatttcttaataatgattcaaaatctgtaacccattttcctgtccatgtaacttgtggtcttagtgctaattcaagttcatatggtgtgattatcggtttataataatccccgtacatatcaacaacgattcctgattgtccacatccaataatacaccatgcatcaacaacatcaaaattagcaagtttggcaacgttaggtttaccaacaacaaacatataatgttttttacctgcttcaacaattgatttggttatttcatttaataatcctctagtatttgccaatgatagtgtgttcactaaaacacctatcgtacttgcagtacgtgcaacttgcatatttctataacgtttcattaatgtagggaattgatcatgtacaatttcagtatcatctgtatcaacaatctttaattcattgaatttagtacttagtagtaataaacgggcatcatgtggtctagaaaggtgaaataatgagtattcttgtgtgagaccatcgtatttacaactttctatataattttcatcatcaaaatcaactgtctccaaatattcgtttatatcattttcattaaatccagttagaattctatcagcagtattaattcctcccttacctgtttgttccatttcatcaattattttacttttcaacccactctttaaataattgatatgagagacaattatattcttataaccttcttcttttaatatttcttttaattcaggtaacatataaatatatggtgtacttgacatcaatacaactttttcatctttatcgatataagtattttgaaaagtttccttcaatttcataagatctatgtacggtttaccaaatacataacatgaattgattttatcaactggattaagacatgcatcaccaaaatgaacaacaatatctgctttaatatgttcagctgcaacttcatctatacaacatggagaatatgatgtatctgcaagtatccacacatcttgatgaaatttactcttatttttacattttgatccacaattacctccacatgtattactatcaattgtcttttctactgattcaatatctctattcatctttgcaggctgagtaaaatcaatttcttcattagatggctcttttacttcctttgcctcttctgaatcgtgaaattctttattaagtgtatttaatgattcttgtaagattgatgctacaattgttgaatcacaaattaaatcatcagggaattgtaatgaaacagatgggaattttaaatttccagtttctgcattcctactattcaaatatttagtcaatttatctaaactgtagtattcacttataatatctctaacttcctctttggttatgttcttactattacaatattttggacctaaatagcgtctcttctcacgtaaagtttcatcggtataaccttgaactttagaaaatagttcctcctcatcttgtgcagttgataaaacgggagctgataccgcttctgtttgttcactcattcttattaccaaatccacagatcagttttaaaaaagaaagactatttaaacaaccaaactgaaaaaaaaaattaaaaaaaattcactgattcatgcttaactttgcaatctcagtaattggacatcaaatttttttttgatctctttaatgttggtttatttgaaacttttgttaagttgaatgaaacttgttttatctgcccttgttgtttctttgatgttaagaccacaaatattaaccagatttataccgaactccttcaaatccagttattcaacattaaaatcaaaaatgtcacaaatagaattaggttatactgcagattatcatgtccatcttagacaaggtgaaatgatggaattagttactccaaccgttagagaaggtggtgtctctatcgcatatattatgccaaatttaactcctccattaacagatattgaaagagctgttcaatacaagaatgatttacaaaaattggccccaaaaactacatttttattaactttctatctttcaaaactcttgactcctgaaattgttgctaaggcagctgatgaaggtgttatacgtggtattaaatgttacccagctggtgttactaccaactctcaagctggtgttgatccaaatgatttcactgctttctatccaattttcaaagtcatgcaagaaaaaggtttagtcttaaatttacatggtgaaaaaccttcagttcataatgaaagtggtgatgcaggtgaagatattcatgttcttaatgctgaaccaaaattcttacctgctttattcaaacttcataaagattttcctgaattaaaaattgttcttgaacattgtacctccaaagctgcaattgatgcaatttatgaaattaacaaagatttaaaggaaggtgaggaaccaaaagttgttgcttcaatcactgcacatcatttatacttaacgattgatgattgggcaggtaatcctgtcaacttctgtaaaccagttgctaaattaccagaagatagacgttcattattaaatgctgctgtttcaggtaaaccattcttttttttcggttccgattctgctccacatgatttatcaaagaaatcaactcatattggtgtttgtgcaggtgtttacacccaacaatatgcaattgcttatgttgctgaaatatttgataagattggtaaaattgaaatgttaaaggactttgtttcaacttttggtaatgctttctacaacatggatgaatctaaattagtttgtaaagacaagtgtgttttagttaaacaagatgttgaaatacctgaaattatgacatttgatgcttcaaacttaaaaattgcacctttcagaccagttgagaaattatcttggtcaaccaagtgggtatagactgatataaaagatctatataatactttctgtatacaataaaaattaaattaacgctaaattaatttgtactaattaaatattacccaacaatatcatgaactttaggtttggatcttgtcctgttgcaaatgtaccatcttcattgaaaacgcacatattgttactcttccaaccccagctttgagatttactaaaatcattaggtactgataaaaatgatgtgattgtaggtttagaacgacgtgatggtgtaaatattataaaataaacttttattgcagatctttcatcttcataatgcataattggattactattattattgtaacgtctatcttgatgtgcagatttatatttgtttggtgatttagatggtgagcgtgaacgcgtcctcaaagatgaaaggtttggtatatctaagtttggtgatgagtggcttaatctttgctgcggtgaattggtaattgatggagatgacatgtcatcagaaatagacagatctatcatattcatttccaggttatcaattgatgaatcaagttgggtgttagttctgttatatggtatagaagtagtggttgttgttgttgggaatgaagaaagtgaatcttttcttgggtatttttttggcattgatttatagttaatattgtccgcaaatacatcagaatttatcatgccagatttagattgagagtttgatataccgttatgagctctatgaaggtaaacaccaatttgataactattttttgatgtaatatgacttttttgcaaatacaaattccagtatgatcctgcataccaaaatgttttgccataaactcttttatcagttgacaattctgagacatttgcaaaagaaacagaaaatctaaacgggttaattttagtccaattatataaaacttcactggcttttttcatgttgagtaaattattattactatttgtcaaatcatcagcttgtgtagattttgcatcatcagcatttaattgattatgtaaagttttagagagactttgatccaataattcatcgagttcctttggtaatccagacaatgtctcatcttttgttggtactttgaaccatttagtattattagaaggaggttgaggactcaaaattaaagaatctaaatgtaacaaatcttgagatctagatacaagagtttcaagttgaactgtctgccataatgcactgtgtaatacttgaggttcaatgtatggattaccattaatgtcattcatctcttcgagttcttgtaattgaagtggtgaaatattacaatagtgaacctttgcattcaatactttctttatcggttcaacatcatcataaatgctagtgtttttttttgaggatttcaactgttcctgtcttctttcaatcaatttgattatgaaaatacatctatcccattcagtaggtacaaaaaagtaatcctctcctactacttcagatataacagtagtaggaattctatcccatttttcagggccattttcccaaccatttgaacacagtatacctttaccattttctataattctttgacttgcagatccgtaatttgatgtaattgcaaatctaagattttctgcaaggttattgatatccatgttttttacaataaaatcagttgctgtgcatacaatttctgggatggctaaatattgaccgatttcaatcatattgtaagaaattttatattcctccaccaaattagcaactccgtataatctagagatagccaactcaaaactttttctctttgtatatatcatatcttcagtgttttcgtccatatcaaattgtaatctataaactttcctataatcactcttcaagtcttcctcttcatcttcagtttcatcatcggagtttaaaccattgatgttattgttcaacgtgctcttagaccatgaaaataaagatttgaaataaggacttttgtcaagaaataacttatgtagcttatattttttaccaaaagcttcaataataacatcataatgttctcctttcaacagaccattgacaaaaagataattaccaatatatggtgtggtgcaacatccataagggcatgtagaattgttttggattggctcatcgtttatttctgtatttgaagataaatctctaatttctgattgtttcaagctaaaatttgtggtattcatttcggtggatgatggtgtgtggtgtagatttgagaaagaatgatgcatttgaagtacttggttattgaagagattttgattcaattggtgttggtgtaactgattttgcacatcagaatccaaagcagtaagagaaataggaggagctgaagaaggtcgcagttcagggttggacatttctaatgatgtgtctattcacaaacaattgtgactactcactttatagaaaggtaatgttaagaaatacatcacaagagttaaagaagttacgagcttttataattaagaatatatatatcgcattactacgtaatttgttcctgaatgggctcaatcccaaaagtatagttactaattttatgtttgcaaactctataaactattatatacattactaccttcattcattcactttctaagaattatcatttaagaatctttgtgtatatttgtaagaaatagttgtaaaaagagaaaaacatttcacaattattcatcttgtccatctgagaaaacctccttaatcattgcagctaattcaagatctcttggagagtctttagagagtaatgcttcatcatcagtatcttcagtggcaaaaccgttaggatcttgcatccagaaaaaatgttttgcacctgaacttaagaaggcaaacatataaactcgtccactcttacatgaattgatctttttccatacaacatcaccttggaaaacaaaaagttcatctccttcaacattttggtctttacctcttggtctccaagtaaatgaataacatccttcaccttcaggactgtgctcaatgataatctctcctggtgtctgagctggagtgcactcattcgtgtcttcatcgtatagcacttttccggcattaaattttaaaggcagtgtgacaggcattttattaatatgtgtatatgtgtggaaatgtagtggtagtaacttatgtctactaataaagacaatatgaattgtaatgttgcatggattcgatccagctctgcagtgttcaatataattttggtattcgcttactaaattttcatgtctgggtccccttaagttagcaatttgataaagtgtctgtagatcatgtcttcttttaagggtatttttgatacagtttttcaacaactcacactatagagacaaataaataaaaatggagtttccacctaaagatgtacagttacttgtggcagaaatttcggacattttaatatcgagaaatcaaaccgtttccgtaagtgaaggtgcatgtggaggattattaagtgcttatttaatttcattgcctggtgcatctaaattttttgatggtggtcgattaatgtacagtttaaaatctagattgaaatcatctggttggaatttagaacaaataaaaagttatacaggtccgagtgaatcagttgcacttaaaatggcacgtaatatgcgaatagaattcaattctacctatgttttatccgaaacaggttatgcaggaccatcagccaatgtgaatggattagataatgtgagtatatcggatgaagaggcaaaggttggtatggtttatttaggtatttccgggcccaatgggaattattcctgtgaaatgtccacagattcgagtgaaagatctaacaatatgcaattattcgctaagtttagtttacaatttttcctaaaaactttgaaacaagaaattcaaaatgaaagtgagaatgcaaatgtcaagaacaatgtatagtgttatgtactgattaaaatgtaatggagcagaacttttattatgcgttgcggctacctatacggtttggtttcaaaaaaaattgagtgtaatattatttgttgtaaaatatacgaagtactattatttttaaaaaaaattttacaacttcaaaaatcaattaaaaataaactattttttaaaatttgcaaaatcacgtgacacaaaaatgtcacgctagaaaaatgtgtaaatttttactttcaacaaatgctttggtggcccagctggttaaggcgtcagtctcataatctgaagatcgcgagttcgaatctcgcctagagcagagcatttattttttataatcagtgggaatgtttctgggtttgactatgtccaactccattatgttgaatctactgattaattatctttatttttattaatccctacttataatatgttttttactgtctttaatattgttacacacacacacacacacacacacacacacacacactacataatcatttcttcaatttccattccacaatcaatgcatctcttgatgaaaacattttcattgctatttccatccacatcttttggttttgcttgtggagcactccagtcatgaacatgctttttatctcttacatttcgtaaatttcttgttaattcctctgctcttaactttttcctcatctcttttaacttattattaaacttcttctcccgacgatttttcttcattccttctctcctcaaccattcctcatctagcttttcagctgatccccattttttaaaagcatattcctctatttgatatcttaaaaacaactgcatcctagaaaatgttccactgtgaggattctctttaacaattctcttaaataataaatgatcagctagttctggttctgtcagaaaataatcctctttacattcagttttggttaacaatgagtatttttcaggatacttttctttacaacttttacatacttgacaaccaaaatttttctccattttcttatcaatatcataagatccacaatcaaaacatttgggaccatttctaatatccattggtggtaaatcttcttcttcatcatcatcttttatcatcataagctttttttcttgttgttgattcttccaatcatttaatgtcattccaataggtttcccatttttatccaatttttgatttgacacaaaaccaccaaaagagtcttgcattgtagaaaaatcatattcaatataatcagattttcgaactgatggtctaatataagtggaaggtttagcttccctagtttcatttgatgaattaacagcaccaggaacagcgggtgtgtaattatttgatgcgtctctcatcgtccctgttagagctctttgcctttcttttattctatccaatgctttttgtctatttctatcaattaaagcctgttgctctgatgttaatgttaatttaggtctttttggtggatttgattcacttgaattttgggtggtttgtggttgaatattcgtattatcaactccattttttatattctgctgtctttggcgtatcctttctaacgccttggcacgattttgttcctattaaataaaaccataatgtagatgttagtatattgtttccagaatttttttgataatatcatccacatacaatcatagccctttttgcagcatccatcattgaacagtgattccatgcacaaagaaggccttttattagaggaaattaaaagattaagccaccagttaatgaatttaaatttgaaataattttttgtatcacgacgatcagccctctagtagtaagtttgtggatatacatttaactgttttgacagatctcgattcattaataattaaaagtattatattagaacttgttcttttctttcttttcccattattccatcacaatacttctttgctaataaatactatggataaacagtggctacaagggtcaccaacgaggaaatctggtacaaattcagctggtttgaattctgccatttttagttcgccatccactcctagaaagaataagaagaaaatggtttatagtgatcgatatataccgactagatctgggatagatctacaggcagcattcagtttggctaatacagaccatatacatactacaaataatgccaatggtaattcaaatattgaaaatggcggtaatgtaaatgatcctgattatttaagagaattagaagctaatagaacgtttgaatcagtattaaagactgaattatttggtgataatgtgcccatgacatataataaatcaactcctaatatccatagaacggtgacaccgccgaataacaatgattttaacatgaatggtataagtaatagtataagtggacgaaatttaaactcaagcttacacaacatttcagatagtgaagatgaaagtgaatataatagtcccacgagagaagaattgcttttgagaacaccacagagaacaccacagcgtcaagcaggtaacctgtttacataccaatctccgagtaaaagtcgaccaaactcgtcgtctatgaatgtacagaatgaattatattcaatttcacctgtcagagcagatacacaaagtttattattatcgccaccaaaaaagactagaaatatacccaaaattcctgctagagttcttgatgcaccagatttagcagatgatttttatttgaatttagtagattggggatcacaagatattcttgcagttggtttaggatcatcagtatatctatgggatggtgcatctggtacagttaatcatctatgtgatcttgggactaatgatagtgtttgtagtgtgtcatggataggatcaggtacacatttagcgataggaactaactcaggtttagttgaaatttgggatactacaacatgtaaatgcacaagaactatgacaggtcattcaatgagagcttcatcattagcatggaatcaacatattttaacatctggatctagagatagaactattttacatagagatgtaagagaacctgctcattatatggaaaaacttgaggcccataaacaggaagtctgtggacttgaatggaatattgttgataacaaactagcatcaggtggtaatgataacaaattgtttgtttgggatggattaaacaaagaacctttatacaaatttacagaacatcaagctgcagtcaaagcaatatcatggtctcctcatcaaagaggtatattagcctcaggaggtggtacagttgacagaagaattaaaatttggaacacgatgacaggaagcaaagttcatgatattgatactggatcacaagtttgcaatttggcatggtccaaaaactcaaatgagcttgtgtcaactcatggatattcaagaaatcaaattgttgtttggaagtataataccatggaacaagttgcatcactcactggtcatacttacagagttttatatctttcaatgtcaccggatggtcaaactattgttacaggtgcaggtgatgaaaccttaaggttttggaatgtatttgagaaggctaaaaacgagccaaattcatcatcagttttacttgacgcttttacacaattacgttgaaatatctactcgatacaattaatagaatgattaacgtctatatctgtataatattagaatgtactacattatataaataaaataccccttttacatgaattataaaaggtgctttaacactgatcgatgagtagctttttttcagtgaggcggcgttcttcaatgtttacctggaacttaatcaagaaaagaaagtgtccttttaaaaccaagtctatttatactcactatggagggtaatacaaggtttctaatgactcccatgatatctccatccaaaatacccatattggtgttgataaggggttattgccataaaaaaattccacaaagatgcattcccccagtcctttcgattttggttgagttaattgaaagtgatccagatcaaaaacctacattgtcaaaatcatttattacaaagaataccgatggcaccaatgaatccaatgatctcttaaaactctatttcccatcacttgatgacatattgtcttctattaatgtttccgtacgatcgtttttcaaaacaaacgataccgttcaattaaattcaaccgaggaagatatagctctgatatcacaatatatacaaaacgatttatggagtttgaaatcatatgatgacttctatacatttttaatttcaacatcggcattaattgttgatccagcctttgaaacaaatttattaaacaacatacccctctcattactaccctcaagtgatttggtgaaaccattatactcttcaagtttcttaggaagttttgtttcggctttatcgattgtgattactacaatgcctttcgaggaaggaatacgaatatggaaaggatttttacaatatagagaggatagtaaatattcacatcctagtcattgtacgaaaaaagataatattttagaatattcatttgaaaacagcataataaagagcaactcattagacaaacaaaacactaaaaacatagtctattcacatatggatttgagtagtttatttcaatcacaagtcatcaagttacaaaagaattccattcctccatctgacgatttgataaatcttatgaaagcattaaatcaatccaataaaacactaatgccctctttataccatgttgaatatttagatcattggaggaaaggtaactatgatcaaacatttgattcactacatagatattttgattatatgatgtcgagtcgtaaacaatatttttaccattatgcacttctggctttagcaactttacattcttcttttggagcaaataaagacgcgttaagagcaatagatgaagctattttagttgctagagagaataaagatttagattgtttgaattatttattgacctggttacttaattttatgatttccaaacctcatttatttatcagatcagacaaacatccacctaggttagaaattctaaactttttgaagctaaaaactaaagaaatacaagatttatcacttcaagcggtatctctacaattcgaagtggtattatcgttattagaaggttcctgtttgaaatttatgatggaaaatttaattaaaaccttttatttgatcttaaattttaatgatatcactgaactgagaaatctttttgtcacagcttgtcaggtaagtgatactatttttaaaagaataggatatccaataatcggtgatatttatttagatatggctatagatcacgcaagaaaaaacaggagtgaatttgatattattgttctatacattcgaagatcagccaatttatttttttcaggacagatagaagaaagttttaatttgttgaactcagtggaggaaaagtcaaagaaaagcttttccgtaactgctaaatggaacatggcatatcacagtttaaagttttatgaacaacttaacaaatgtgaatattcacagtgtgaattattgttagagaaaatggattcattatccgctaccatagatgatcaagagataactaacgaatatctataccaaagggccctatattttataaagctatgcaatgttcaagattcttacaaaataattactaaacaaattgagtgtatgaaagagaacccaattgcttacaacaatttttggtttatcagatttcaagtattacaagcaaaaatgtatgtcacctgtactcaatacccagatagaagtctaacattactattaaacgctttgaggctttctcacaaaggttcgttaatgttcaattattgtgaatctgtgatttgcttgtgtgaacttttgttgaaatctgatccattgaactctacatcagatgtccagatattactgaacgaactattaccaaaagtgatagagattaatcgaaatgatcttatttcagactcatacttgttaatggcaaaagctctgttcatggaaagtgagataaaggaacaaaagtcattgaagattcaaaatgatagtttcaaaatcctgaaatgtttaagaattgcatataaaggttacgaatcaatagaagatcacgaaaagaaacatctttgcttaaaattagaaatgaaaattgccaaattcttcaatattccagaactagaatatgatcttgcgtctaaattaaatactcagggtcaatagagacaaattccatatgctacaaattccggagttagttcacataaaaaatatattatataaacttaaataataattaactcaaagttaccaatctataacactttgcagttcttcaattgcgatattagttttcttcacacttcgaactctgctataaaagacattacaatcttcattagagcaacactcagccatttcattagataccatttctccaacagcaacttgtacgcaattcttacagaaagagtagtatgaggatgttgtgttctcccatctctggacacgatttttgattgttaaaatgacttttagttcattctttttacaattagcacataatttaccatcgacagcagattccccacaacaaacacatatatcaactcgaagattactcaatttgatattcgtatttgtaagctttcttctttgaggtatctctctaacccatgatctaacatcaattcctattaagttaaatattctttccaacgggggtataataactttattaatgtaataatccgagtcaagtcgcatctctttcttaataaactccgatggagacacacatttgtccctaagaatttctttggagtttataggttgtctgacaagataaaagatacgttctttgtattgaggcgtcaccctatgatcatctactgttcttttcattgcaagtcttgcaccagcaggtatgtatttttcattcttataggtacccactctaacttctttcgcaaacataaaatcttttatgttgactttgttatctataatcttcacaaattcagctattaagtaatctttcagcacactcatatctctagttccaaataaaatagttaatgatttttctaagattttttgttgagccggtataccatctcttctcacagtctcaatacctttcgcatcaaactttggttccagttgagattcatactcaaatgaccaaccaacatatcttttcttactaatcaaaacggatggtagatatactttttcaaatttcaatttaactggactcggattcaatgatgtaatatggtctgcaatttcccttcctaaccgaaatgcatcatcttttgtcttacctggcaaatacacaaataatgaatcagtatccccgtagacaacagttgcatcccatgtaggatttgcttcaataaccttaacagcatttaataatgtttcacgagcgcaggagacgattgcatcagcaatatcagaattaggcattctaccagaatatgttgcagaggtataaccatacgtaacattggcaatcaacttcaaagccaactgtctattattgtacagctttcttaattccaaatcgtctttaaagtagttcatagtattcttaacataaattctagtatttaatatctctaataacattttagataataatgatttcctaatattttctttggtaaaaatcataccatttggggtgatggttatatcattttctaaatacttcaatattccttcagtagctttgtaagttgttacacccatttttgtatactgattaggattatagtttttaagccttccaagtaaagtagaataacatatattataagccataatcaaagaaggatataacgattgaaagtctaaaacaaccaacggcgatttgtaaaatgcactattgggctccataactaagggaatacactccaatgaatcttgtttaaagacttgtttttttgatggagatatcaacattaagttttctgcttttgccaatctaaccaataaactttcaaccttgaactgacttccacggtaaatgattgaatagaaatcaatgcccaataatctggactgttcattaattttttcaatgacttctagtttcattataagatccatttcgtaattgactctttttatatagtagtttaataaataaaaagtgtttcttctatttccattccacatattcgttaattttgtagattcaaaaaatggtaacctttcatggaaaatatgaaagacaacattttctaaactatagtgattgagatttagttcacttcttaatcttctccaaatatttagcatttgacgacctgttatctttatagaagaggcatgtgtatatccatatctgtcacccattttattgttttgtttggaaaaaactctggatagtttaagtaatagattcatttgatgttttatactggcacgctcaatgatatacccccaagaagagttatgcaattcccatccggataaaatatcaggatcaatatattctactaatgaaacaagcgcaattattaaatctaattcagaatcataacatgtaacggaaatcgatgattgattggccaatgacacgtatttgagtttatctttagagttcaccaacacacccgtagatggtaagtgttcattatttacaaacttcgatttaaaggaccaaaatatggcttgaatatcatcaaattcaggatcaggcaataactcacctctcgtattcacatgaatctcaattattagcaaagataatggatttaaattttcagatgttttttcaataggtgtctgcaatgaagggtatttgaattctttgaatttctgtgtaggtcctttagtttgtgatctaaaaaaggaattatttggtttgctattgattttactcttaaattcatttttgcaccagtcatgaacatctttatatgagggagcagtaggcgtatatttccaaatataagaatctgtttgatctttatttagcaaattatattgtttaactgatgggtataatggcagatctgtttcagtgcatttgaaagtgaatttttctccagcaaaaataaatggcttcgagtcaaaatttgacaatcttgagtaaaagggatctggatattcaattttactcatattaaaattagagctaagactatccaggaaatcatttttagaatttgctagtggttgttgcagattgaaaacaaaaatggattcatcattgactttattatcagtagagaaataggaattcaatttgattttatcggacgagcttgctttacgccgagtaaaggaaatagttgtatttgaaatattgtttttaaaagaatttagtagtctggagttgtttactgatattgaatgatctcctaactcatctgtcattgatgcatttaatttttccgttagagattttgtatgattcattacaggtgaagtatctgcattttgatcttcaaaatcatcagaatcagattctgatgcttcataatcaacagggataattggccgtttgtttaacaaattatcattacttagtggtacatagtgctcattagtgtgagtttcttttaattgtaaagtttttagtgaagtgaaataatctgaacaatttagaaatttctttgacatcagatatctatcatcaagctctattctatactgtaatacatcaatattttgaaatgcggttttaacgtttttgggtatatgaataagttttggtacatttgaaacgtcatattctttgaatttatttacataggaagattcagatgcttgtattgattttttcaacaatttcatcaaatcatcattatcactccacactaacggagtcttggatctagttatattatcatatagtcccatttgagaagaaaatcctgataaccctcgggatccacgtaattgattgacgtcatctagcaacgattttgttgatgtaatataagttgtatcaggggaagagtggtaatcatttatttgatcaacatgcctttccgataattgatatctattatcaatccaaggggataaaatatctagttctaaaaatgacttactcattcttggaaaacatttcgattttaagacattgaccgacgatttgacggtatatatgtgtttgttaattaatttatgtaattcatcagttagttttagtttgttaaaataatctaagtttgtagagaagtaagtatcgttttgagtacttgaaagttgaacaatgggggatctccaaaaatgattggaaacattgactgtttttaaagtgtaaatgttgtagtcagataaaaattgcagtaaataaggaatatgaaattcatatggttgaataaacttattgaatactttagattccaaaagtaatctgttaagtctggatatatactttggagatgaaagactaatttttaaaaatgttgattgtccaatatgataaccgtaaattgaagtaccagctacaacggaaaggtcagcaacaaaattcttctgatttgattcaaaatcattatcaaagtccatatcatcgagatcactagaggaatcatcaacatcattctcaatatcagaatcatctcctgttgtttctttctttgatcttttaggtttcttaacgtgttttctctttgatttgaaagatattgcaatttgattattgatttccaggaaccaactattcaactcttttttcatttcatccatggaccacaactttgcatttggtagaggaacatacaagtaaggaaatacattatgcacatgaaccatgactggagcattttcaactatagcataaagtcttattattgggactatttgtattttttgatgggatgtttcaattccattgaatgaaacaaacgttctgtctaaaggagtaggttctgattgataagagtcatacgagaccacttgtatttccatcatataggggaaatcattaccattatcaataaagatttaagaaagagtaataacttaagtgtaaagtgaaataattattagggttaaatagagccatgatctcactgctactacctgcattgatagtttcttcttcaataaattatagattgaaactgtaaatacataaatccagctgactcaatgtctgtatcactgtctatgtctccagctcctcaacaacctgctcaaaaaaacgatatcgttcattggtctcgtattccttcatctgatggcgttccacaatggacttcttcatcagaatctaccaaatcatttgttgttacaccactacctacacaagttctcagtaagtgggcttatgataaatctccagcgtttaagaagccagaggcaccatctactcaaacagagacaggtctttcacatgaaaatgcccttgatgcattgtccgcaggtggcggtgatgataatggaaatgctaacactcttttcggttcaagtgctgctgcataatacaacaacctaacataaatacacacatcatctacactgaatgctgatatactggcattcttttgaaaatattcacttctaaattgcttgtatattatataaaaattgactaaaacttaatactgttgattaaactattaaacagttacaaccaaggaaaccagaactacaacatatctagtttcaaatgtaaatcttgtcctcatatgctacatataatattatctaaaaaagtaacttgtaagaaagcaaagaatttgttagtgtctcgttatgaagagaaattatttcgtgtcaatgatttagctagtatattgaactaggttcatcttttctcccgaacttccttgttttagcaaatgtctgccgaagatacattaccctgggtagagaaatatagaccacaatcattggatgatatatatggtcaaacagctgctgttggaaccataagaaaatttgcttcagagggtagaattcctcatctattgttctatggacctccaggtagtggtaaaacttctacaattattgcattagcaagggaattatatggcaagaattacagaaatatggtcttagaactaaatgccagtgatgatagaggaattgatgttgttagagaacaaatcaaaacatttgcaagtacaagacaaattttcacaacaggtttcaaattaattatattagatgaagcagatgcaatgacaaatgttgctcaaaatgcattaagacgtgttattgaaaagtttacaaagaatacaagattttgtataattgcaaattatgcaaacaaacttaaccctgcacttttatcacgttgtacacgttttagattttcaccattaactaatgatgctataaatggtatgattgatcatgtctgtaaatcagagaacttaaacattactaatgaggctaagatttcattgattaaattaagtggaggagatatgcgtaaggcattgaatgttttacaagcttgccatgcatcattagataacccatcaactgaagaaattgatcaagatatgatatatgattgtattggagcaccaaaaccttcatctattgatacaatgttaaatgctataatgaaaaatgattggtctgatgcgtataatacccttattaaaataaggagaattgaaggtttagcattagttgatcttattacttcatttgtggaaatacttgataaatatactctcaaacctcaaacgaggcgtctcctctaccaaggtcttgcagatattgaatatgctatctctaagggtggtaatgacagtattcagtcaactgctgttattggttgtattaaaaacgctttagagtgcgagtctatgtaaaagctttgtagatttgtatcattaaattactgcttcagtgtctttctttaacagacaaatacaatatttatagatgcttacacagacagaattacaagagctggttaaacgacgtcgtgatgttcaagatttggaccttgaatggtacttaaaagttaaatccgatattttgaatcttttgttagaggtgaaaaataatctaaatgattacagtgatattttgactccaactcgaataaatgagttacgtgacaacttgaagttagctaaagctaaagtagagctctctcttaattatgatattgctaaatacactataacatcaaaagattcagaaaattatgaaactgacttacgtgaatttttaagtaaatgtctatccgaattaacttcagagtttgaaattgtaaataaaaaaatcaaatatgtcaaagatattctttataaaagaaacagcatcaataatacaattatggaatatttagagaaggccaaagtcatcaaacttaccgaggacgaaattaaatcattatttgaaaatgatgtttctgatttaaccgtaattttttcatctggtaaacttatatcggaagataagttaaacaaaggaaataatgtttatgaatttaaattttctaaagaaggctcattcaatctatcaatagatgaacttaaatcaaaaatcgaaagacaaatagctgattgtgaacaaattgaagaaaatattgccaaatcacagaatctttggaaaacatcttcagttaaccttgtagaattattaaacaaaatagaggaacaaatagttatataacgtgtgtcttatttactggtttcaaaaccttttttataaaatatattgttaatttaatttaagttataaatgcaactgattaaataatttatttacaggtaatatttattacatttaagcactgatttcagcactttcaggttctggaatttgattagcttcattaattttttcatcaactaagttttgaataaccataatttcctttgatcttggaataactaatccactttctctatattcaacaatattttcaattgcaattttgaaaccatctaaagtagaaccattttcaaaaactttgtaaacttcaacaatatctttaagttcagtaacagctttttcctctatttgacttgaaaatttatcaaagtataatgatgaaacgtattttataccttctaagaattcttcatttataataacagattcataggtagagttaataccaaagatagcatattgcaatctttccaatttatcaaaccattcatcagtttcaacattttcttcattaagatattcctctttaaattcttttaaatattcttctccaacaactttaaattcttctcttgcatttcttaaacccgcttctctttcacttagtacttgtctaattgaaagcatagagttctttaatgcagtttctaattccatacattgttgaatctttgaacttgaaatatcttcatataaaactgcttctctttgaattttgttcatttcctttaaacatacataccataaagcatgtaaatcttcaaatgatttttttcttaaatcttgaacagtccacgatctaccttgaatatctaaatcatcaacactacgtacaaattgcttttcatgaaaaaattcccataatggatgatcttctctgattttgaggttatcgatggttggtaaaataggtttacgtaactgcacatcatgtggaattctatacccctttgctctcgcaaatctggctgccaccgtactgaatcttgcaacacctaccattgtcgatactatccagtgtaaaaactttcaagtatttaatcggcctgaaaagaaaatcactctaaattcatgtcgacgaagtgaaattttagattctaaggaaaaaaagttcacacttcggtcgatcgactgtaacatgaatattatacttgttctatcatcatcatcatttcaattagtgatatatactgtgaacagagacacactacaccgatcgatgttaaaacagatcagacactcactacgactactgaggttttattccaaagatgttgaagtggaaacaccaaaaataatgaaaccaaaaacaccacttcaacaactacaagaaatgaatgtgaaaattcctaaggctaacaaaatgccaagtcgacctaaaatacccgaatctgatataattgagaagtttattaaaggtggtacagggaagggaggacagaaaattaacaaaactaactcaaaagtgcaacttactcacatacccacgggtattgtcgttacatcccaagctactcgttcaagagaacaaaatcgtgataaggcaagggaaattcttgcaatgaagattgaagagatggagaaaggtgtgatgtgtaggaaacaaattgtgattgctcgtaaacagatgttgaaaaagagagcaaagaagaagacaaaaagtaaatataagaaattagaagaagaaaagaataaaagcatcgatgaagtcgttatcgtagtggattaattaagtctattgggaatttcctgtctatataatatataaaataataacattagtacatgtgttattgtttctaatttgagttttatacaattttactcgttttgatccatttggcttgtttggcatacgctttttctccatgatacgatttcaacactttatctaattctggatcatgtttgagaaacatttgaatggacttgtttgaccaaataccagccttcatagctaataattgtacaccattagtattgatacagttaacaatacattcttcaacagaactttttattgacgtacatcgataaataagaaaaactgtgtagtattcttgaacacctacctttaatagcaatttactcaattctttaggtgatattttatttggatgttcatgaaatatttgtcttattttcttaatgagttcagatttgtcattaacaacttcaaacttgataggttttccgtgtttacgttgtagtttcttaaacggagtttccataaattcagtagttggttcgtcaacaaattcaatttctggagtgaataatggcatactcgatttttgggagtctgatacatttgttttttgagattcttgtaatatatttaaattcgagtttttattttcatcattaactgaattctcaaccacattttccttttctcttctttgatcttccttaactagttcatcatcaatgttaccataattctctagactttttggactaactttacttcggcttccaatatcgttatttacagattgattatcattatatgcaatcattttcctgaatggattttcaaattcaaatatcctgccatcataatctggaatactagcaaactctataaactcatcaataaaatcattcgactgtggtacatgcggaaagaataatctaggacagtcagttttcttgatatgttttctagcttgtaaccactccttattagctaaattcacaggtaacggagtttttccctgttgtctttccatgatataatatttgatgtaattggtaataccaaagattgatatataattcttgaatcgttgtctccaagactctgcagaatgtgaattataaacaactgcaaatttatcatagaaattagttggaaagatgacagtttcaaaacctttctcatctgtgacaatatccaatttgaagtacactgttttacataaaatcaaatcatcacttgctgtatatgcagttaacttgtttgtaatcattgtagtacgtaggtacttaccatttgcatctttcataattctatgattcgcatctaattgataaacataacccaaattaaactttaatgtacgcattctttctctaatagatgttgcagttctatgtctattacgaaagtaaggtaattgtgaaataatatcataaacactatgtcctttaatacccatccagtgacgtttacgtaactcttctttcaaaaccatatcttcttctgctgtaaagtatctaacagaagtgtcttcataccgcgtcatagtcatcgtttcatatgaatggccagtgtttactaatgatctacttaagttttcaaagtcgatgtcacccaaggcatcattataattagtttcttgttgaattttggaattatttatagtgatcctgttctcattattcttttgtaacgtgtcctcctcctcatcttcttcaatctcatcatcatcatcgtcttcctcctcttcatcatcatctacaacactattattaacattactattgtcattattgatgttgtcattgatgcaattattattgctatcattgatatttaaatccatttgttcattacgtgttttatgagcatactgttgtggaacagaatcattgttattgttaggtatatgtattaaatagtttgaaaattcttgttgtgcaccacgattagcggaatcttgaataacttcatatgaatatacatgtgcattattaagttctttgggtataggttgctctttgcttgcaattataatacagttctgacttaaatcagtaacaacatttcctccatttttgacaattatatgaactagcttctcactgtagtttaatggtggacataggtaaaaattatatggtttttgagccgcatcaataaacaactgcatttttcttgtaaattttcagatacagtacaagtaggataatatacaaatgggatgttaatgtctaggagaatgaataggttaacacttgttaaatgtaagtaagaatgtatatatgtttatcgagaataaacaacagtaactactagttaaaattttttttagtgtgaggtctacgggtggcgacggtgccagtcattaaagttttattaagataagaacgtgaagatttatttcagtgctagacgtaaatctgtctcttttagaaacatcaattaccattggagtgtatatcattgatagaatgagtcaagagcgtggacgtgcacatcactctttcaatactaatgttgcaattccaaggaaggcacgaaccgtctccagatcacgttccagagaaagatcaaggtctcgttctagatcacgagatagattcagagatctgtcaccatttagttatgattcccgttcacacagcaattttgacgatccatttcatactattgcagaggatgatgaaaatggtatagaaatgggagttattctaccacattttagcagcacttcaaactcaggtaagtttgaaccactaaatgaggaaacacggaaacattcaaatgatacccaaccagacacagattcagatacggacttggatttagaattaggaattaatatagatcaaaaattaaatgcaaataagagacgatggtggacgctggcgccaagcagtagtagtaagatgtcattccccgcaaaagtagataaaggggataaagttgtgttgccagatttcacattacctacctcatcaccggcagcacgtatagcaccaaaaattaaggcattatcaccaaggagatcacatggtcaaattaatgttcatgtttccggagtgaaagaaagagagagatttgttgagaaattatgtgaatcattaatgcttaatggatgtccaagtcatcgtgttgaggaatggatacgagaaactgcaagagtattagagttaaaggttacatttattgcattacccggttcttttgttataaattttacaaatagtgaacgtgttgcaattgttcgagtttcaagtacaatcgatctagggaaattagatgacattcatgatatttatgaaagtgttgttcatgatagaatgggggttcaggaagccggagatttgttaaatgagattggaaatagaccaccaatgaaggcatggctggttattattttatattgcttatcaagtgtttttgttttaccattttttagtggtggatgggcagattttggacccattgcagtcatcggtacaatattaggtgttttaaattttttacgtggaagtagacctgcacttaatggtatagctgatttagcaattgctgcaattgcaggtgctgtgggtagagcacttggaggaattaatgataatggtttattttgttttacagctgttgttttaggtggattatgtatggcattaccaggatatgctgttttaagatcatcattagaacttcaaggcggagcagttatttcaggagcatcaggattactttcagcagttatttattcattgattttgggttttggacttttatttggaattgtttttgttggatggattgacaaagatgcaactacagtagtttcatgtgaatcgttatcacaatcagttaaaatgggtgcagcttggcaatgtttatttataccattatttacagtttgtcaaggacttgtatgtggagctcattggagacagattccagttattgttattgttggaagtgcgggatatgctgtttcatattttgttggacagcagacgacggtaacaggtattggagcagctgctggagctgcagttatgggagttatgtcaggaatttatgatatttggctacgtaatataccattgttaggtagatgtagtacaagattagcatgtatgattccagcaattttcaatttagttccgggatcacttgctgcacgtagtggtattgcagcaggagttgcagcatcatctaaagctaatggatctaaagcaacagatttaatcggatttgcaggtacaatggttgagattgcagttgctattatatccggtctagccgtcgcgtccatgataatggctataatttccccacgtaagctacaaaattccattggattgtaagaatatagaagtgtataatgatgatatatatgttgtgtaagtattaatatgcactatgaactaacacagtttaatcagagagaatcgatgtgagtatatttcgcaataacgacatgaccctcagtgataaaacggttactatcggaaagatcagaaagcttctgaaaggttccgcgcctccaagaaaaagtattttttaaatttttttaaattatatagggattgtcatttcatttttaactattttactgagggccaatgttttttctgttgtgaatgtttataaattaattgtagcttgcatcttatacgttttactttctttttgtatttctatttgttcaagttaccttattcttatttaacaaaacttattaaactatcaaaatggattcatcaaaaattattgcttactgtattgcagtcatcttaccaccactttcagtccttatgaccagaggtgtaggtatggatttaggtattaacattatttgttgtatctgtggttggattccaggtatgttacacgcttgttacattgtttccaaggaagaataaatgtgctgatcaaatcatgttcaattcaattgacaattatatctctttttttaatacatttcatgatactatcgttttataacttcttttttgtttaattattttaatctcacatatacattttatacttgttattattatttacttacttattctataattaaatataaatatgaacatcagtacaaacattcgaaaattataattgtaataagcctactactccaggggcatcctcagattaccggtacctatattattaagaataataataaacaattttgccacccattcgctctctttttatatttccgctcattactatttacttactagaaaccctaagaaatttctggggaatcatcagagtaaacttcaatatgcagtgttacctatgcgttcattaaaacattgtatcgattgttataaatatatgatttccatgttattaaaggtagacgtaagaaataacactcaaagataccatgtataacagttaatttacaggaatataatccaactttcacaaatataatctaagaaattcccttatcgggtcaaaattcttcgcatggaagcaattttataaacctattagtatttacttttcactatataaatttaaaggagcaaaaggggcacattttcaaagctaaataaatcaatcccatcaagtcaatatatttttatagatccactaactttttgccttccttttttatattaagtggtatctgtagcatcttaatattgaattaccacaaatggaagaaccttcagtatttactttatctaataagcgtataatgagtgaaaagttaaagagagctagaacttatgcaggctcatcctctatggttaatccaatgagagatcttggattatacaattatcctaatgatcaaaaagttttcagtagtaaatatgattccaatagtgtaaaatatcaagatgaaaatgttggaggtaatcatcaattaaattcatctttcattcatcaacctcaacctatcaaaataacaggtttacaaccaagatttataaatagtgatgaacaaaaaagtttcaatagggaaagtttagcttcaactatggaactttcaaatgatccaaaatcgccaatctcttattcaaccctcataaatacaaccggtcatttattaactttaaaaaatgacgataatgtttctaccgacgagtttattaacttagatgaaaaaaataatgattcaaattatacttttaataaacatagtaaatataccaaagtggatatcgaaattcctaaagttcaattagcagattcagacgagcctttagatttatcatcaatttcaaataagtttctaacagacactagtcccttttatcaaactagggaatttaatccagttgatacaacagataccggaattctattgaaaattttgaattatgaatttgaaagtatcccagatgaatcagatattgatgatgataatgataatgttgatgattatttagatgaaaattctcaaaatattgttccatggtatcgtaatattctcaattttaattttttcagaagtgttattgatgctaataaagttctttcaaaagatgaatataatgaaaaattcccatgggataagttttatgaaccagaacttttcgaattccccgaaaccgatgatattaatgtacttaatgaagatatgattccaagatcttatcacgataccattgctagtagcacagacttttctaaaaagcaatataattatgtctctaccagaagaaagcttaatactgagatataatatattcaaataattccataaatattctaatttttttatattataaataatacttatttttgttttcttgtatgtcaatttttgtttttaatttcacgtatttctaataaatttgaattttttctcagccctttcatgaaactagaataaatacaggcacctgaccattctctaatactatcgatacaaactagttgtattttttttttcatttgtttttctatttcttgatatagtaatttttcaaaccctttaattttggttaatccagagtttataattatcttcgaagatacttcctgtcgtatatcaactgggagtgttttttcaattaaggttgatacaagttcacttatttgtaactcatttatatcatcagacaaatttgtttgtttattaattaacactttttggatagtttctattataatttcagcttttattgagtagttcccacaaataagttcatctgacggattcatatccaaactgttgattgaactcaccattttttcaacatccctgaatgaaatatctgaaatatcaaaacccaaatccttcaattgtctaaggattgcataatgcaacatacatccagctctatctgtaacctgcgtgtaattagtcaacactctattatcagaaacaacttcaatacaagtatacgaccaccctatatctattacaattgaagaatcagaacctgatgatatcgtactcatcaaagctgatggtaatagtacaactgcacgcattctaaacctttcaataagtaatttagtaatcacattgagataaatgtccggaaatagggatttgtgtaaaagtattaatttagcattcattgttgaaatcccacatttataaaaaattttagtgaaaactttgattaaatgattatgaaggtccaacttaaataaatctaagtcattatagatggaaatattaggattgaataaataattaaaacatgaaatgtctttgttttgatattgatttatttcatcaaaaggtttattatcacagataaaattttgtttctctgcaaaatgatatacattgaaaacttctaatggagtaaaatatccttcataaccacattcaatagttctactccccaatttcagtatgatattccttcccttctccatctaatgagttgtgaaaaaatcgagtttgttcaattttacacaattttgtaaattataaatttcagtacaacttcaaaatttgttcaccgccttaatgctataaaatcaaaacaccaaaaattaatttgttacacaaatctttaattttactaagatttttggcacaaaattatttaaaatatatcaattacagaccatgagaataaaatatagataatataataaaatacaagaaaccagttactcgattccacgggagtttcaaattaccacactactgcaaacacgtcaacgaaatataccttagcgaaggctcatcatttttctttgtatttcaaacatttttcattttggaaggctcagttgttcatactttactatttcttcttttatctttacgaacaatagaacaaagatgtctagagaggaagatatggatggaatgattggagctggatctatcatcttggtagatcaattacaagatttaggtattaacgctggtgatataacaaaattaaaagcagctggtatttattcagtttctgtaagtaaattgaaaaagttattgtctatttatttgaatattcttactaacataaacacatgcataaatttgaatagaccgtaatgtcaacaacaaaacgtaacctatccaaaattaaaggattgagtgaagttaaagttgaaaaaattaaggaagcttcaaataaacttgttaattgtggatttgtttcagcattaattcaatgtgatattcgtaaaagagttattaaaatatcaacaggttgtaaatcatttgatcaaatgctaaatggtggaattagtactatgtctacaactgaagttttcggagaatttcgtacaggtaaaacacaattatcacatacattatgtgtaacagctcaattaccaaaagatcaaggtggtgctgagggtaaagttgcatatattgatactgaaggtacgtttagacctgaaagaattcacgaaattgcagaaagatttggattagatggtaatcaatgtttagaaaatatttcatatgttagagcattaaatagtgaacatcaacatgagcttgtagaacaattaggaatgcatttgagtcaaggtggatatagattaattattgttgattcaattatatcattatttagagttgattatagtggaagaggagaattaggtgagcgtcaacaaaaattgaatcaacatttatcaaaattaggtcgtatggccgaggaatttaattgtgcagtatttttaacaaatcaggttcaatcagatcctggtgcaagtgcattatttgcaagtgttgatggacgtaaaccagttggtggtcatattttagctcatgcttcacaaactagaatcttattacgtaaaggacgtggagatgagcgtattgctaaaattcaagatagtcctgaatgtcctgaaggtgaatgtacatacgttcttggaagtggtggtattatggatgtcagtgaatagtaaatgttcagggaggcttgaataatattataataaggacatataaatttgagagacaaagcttgctcaagtcacaacaagtgtgtcactgtctcgctatcagtaatttatcttttgctagttttaattagagaggagggttttttttataaatccataattaattaatttgtgtaatctttttggtctgtgtgttgatattattatcatactcataaatatcctacattgtttgattattggataggtagaaagattctaatacttaaacacataaataattgaaaatttgaaataatgggtgcagttttatcattaccacttttgcccgtaagtatagtaggatcatggttatcatcatgtatcggagtttccatatgttcatgttgtatgaacaaaaatgtcaatccattaatgagaacttttacatcatcaattgcaactcgtataatgtatgcagttattttcatgtttaatagtatattgtcgtggatgtcattatctaattcaataacgaaactagtcgagaaatttacatgggggttgtttaaatttggtaatatgtattgtaaagaagaggaaggatgtattgggttcacaagtgttcaaagaatcaatttttcattaggattattacatttaatacttgcatctttattaattggtgttaaatcaactagaaatccaagagcagttattcaaaatggatattggttaacaaaactattcgcattgacatcatttattgttataagttatttgattccggatagtttctttgttttttgggggaattatattagtattattttcagtacaatgtttattggaattggattaattttattagttgattttgcacatgaatgggcagagacatgtattgaaaagattgaagaaggtgaaatttcattagattatacagatgataacaatggaacatgttctgaagtttgtaattttgaaggtgcaaacttatggaagaaattattaattggtggtacattatcaatgtacaccggagttatcattatgactattttaatgtatatgtactttgctcaagaaggatgttcaatgaataagactgttattacaatgaatcttatctttacattattaattacagcattttccatttcaccgacagttcaggagtataatccaaatgcgggattagctcaatcatcgatgtgttgcgtttattgtacatatttaatattcagtgcatgtttaagtgaacctgatgataagttatgcaatccattaattagatcaagtggaactagaacaattacagttataatgggagcaataatgacatttggagctgttgcttatacaactacaagagcagcagcaaattcagcatttaatcatacaagttcaacatctactactttagatacattcagtagaaatgtattaacacaacaaccaactgcaactccaagtatgagatatgaagcattaagacaagccgttaatgaaggttctttaccggagagtgcattaaatgattatttaagtgatgatgaagatgatagtgataatacattttcatatggtgaagaagaaagagattcaattaaatacagttatgttttatttcatattattttctttttagccacacaatatattgcagcattattaacaattaatgttgcagttacaccatcagatgaaggtggatttgttccagttggtagaacatattttaatacatggcttaaggtatgcagctcctgggtatgttatttactctatggatggacacttgttgctccagctgtatttccagacagatttacataaagataatgattttcaggttatgttcattaaagattaccaaatcaacggttgttattagttatagcttaggaattaagaattaacgaagaacaataagaataacagcgaacagtgaaaaaagttttccattcacattgtcaatgatttaaactgtgaaatttacaaaaatgaatttttctcggtttcgtggtataaaagtgtcgcaatttccaattttttttggtggaattggaggttgcatattgatctggaactatattttttttatttttttatttgattgtgttgagaatattattattttgaatgagattgataaaaatttgataacattttagtttacttatattactagtattttaatttaatttaatccaattaataattgatcatttatttcatggctttcattgattgatacatttaataactttatttaacattattttattttattttaatttatttaatttttatttttattttcatattttatatttgtgttctcggaatatacgatagatagatataattatgtcaagtgatccacaatttgacaatgacaacaatacagacatagtcgctgatggaggagattcattcccaggattagaaggttatcgtcgaatgaagacacatttcccatctgcaagagttaagaaaatattacaaagtgatgaagatgttggtaaagttgcacaggcaacaccactggttgttggtagagcagttgaattatttatgtgtgccttagttgaaaaggcaatagcagagagtagtaattctcatacgaagaaaataagtgttcaaatgttaaagaaagttattgatgataacgaagagtttgatttcgtagctgatgtatgtgacaaatacttagaaaataaagataacaaagataacaacaaacaggaataaaatacatcattttcttatgatgtaatgatgaataaaagggcccccaaaaaatagggggtaaacatagggactggcctcaacctcccatcggaaatgatacactttttttaaagttgctgttttccgggttattatattttttatatttaaatgatggttttcttgaaaagtttaaatactttcatctactttatatccctttttatataccatataatcagtaattgaacctgttgattcgtcaattatattattactaaaattaaatcaaagaaaataaacagaaatcgctatggcattatcaccagaagtttattacgccggagtcgatgtcggtacaggatctgcaagagctgcaattgctgattatcaaggtaatattattggattatcggaacgtccaattacaagacatgaactgaaggaaaatcatattactcaatcttcaactgaaatttgggatgcaatttgttattgtgttaaaactgcaattcaacaatcaggtgttgatagttcaaaaattttaggtattggatttgatgcaacttgttcattagttgcaattaatgaaaaaagtaatgaaccaatggcagttggtcctgattttgatgattctcttgaaaatataatactttggatggatcatcgtgcagaaattgaaactaatgaaattaatgaaactaatgatgattgtttaaaatttgttggtggtaaaatgtcaattgaaatggaattaccaaaaatgaaatggttgaaaaatcatatgccaaaaaatatgtttaatgaatgtaaattttatgatttagctgattttcttacaatgaaggcaacaggtaaagagacgagatcattttgttcagttgtttgtaaacaaggttatataccaaatggaattacaaatagaaatggttggtctaaagaatttcttcataaaattaatttaccagagttagcagcaaataattttgctaaattaggtggtttagattgtgttaatggtaaatatttaacaaccggtgaaacaattggtccattgaatgcaaaatctgctaaaatgttaggattaacaactgattgttatgtaggatcaggtgtaattgatgcttactctggttggataggtactgttgcagcatctacaaatttaccaattcctgaattaattgaacaagataaagataaaagtggattatctaaagctacaggtcggttagctgcagtcgcaggtacttcaacatgtcatatttgtattgaagaaaaagaagttttagttcctggtgtttggggtccatatagagatgttttaggtaaatcttattgggctgctgaaggtggtcaatcgatgactggtgcattattagctcatgttttatcaaaacatccagcttatgcagaattgggtattatgtcagaaagttctaatttatctaaatttgaataccttaattctagattggaaaatttgaaaaagattagaaaggaaagaagtgttgttgcacttgcaaagaatttattcttttacggagatttccatggtaatagatcaccaatctcagatccaaatatgagagcttcagttattggacaatcaatggatacatcgttagattcattagcaattgaatatctagcagcttgtgaatttatcggacaacaaaccagacaaattgttgaaaaaatggaagaatcaggtcataatattaaagctatttttatgagtggaggtcaatgtcgtaatggtttattaatgagacttttagcagattgtacaggattacctattgttattccaagatatattgatgcagctgttgtattcggtactgcaatgttaggtgcagttgctgcagagtatgcacttaaggatagagaaggtaatgagaagccaggtacatttgctataaaaaatccgttgttagagaagaagtttgctttagatagtgttcctgcatcaccatatactgcaccaacagctacaacttcagttacatcaattagtgcgatgaatcaacgtgatggattcccattcccattaactcaaattccaagattaacatcatctcttaacttaacagattccgatgatttagataacaataatgataattcaagttctgaaggtataatctcttttaatccatcatctactccacaacaacaaagtttaagtgataaaagaaaaaacttaccattacaacaagaagaatcagtttcagatcgtctttggagaattatgactcaactttcaagtacaggtagtgttatatttccttcagatattacacatcctgataggaaactactcaaaactaaatatgcaatatttttggaccaaatttcaacccagcaaaaatatagggacatggtttccaaaacagaagatgctattgcttcctatttatctatttaatgattttgtatagttttatgaacttataactaagattaaggattgaacatattgaggagaatttctacttaaaatagatatcggacttataccatactggtcccaaatattttttctaaaactccgagattacgtgcaatttaagccagccaacttcccgcctgattccgctgggggggcatctccttatagtaaaaactgagcgggggctaagtcactatttctcgtaacttaaccaaggagtggcatgaggccacacaatacgagaaggtagggtataaatagtcgtatttccgtctgctgatacttgaatgtcttttcccttaaattccagtcaattgacttttcatagttgaaaatcattcgacaatcatgactttatcatctcatattgatccagataccattgaagacagaatcttccaaaattctgtcagtaaagctacacttattagtaaatatttcaaaaagttttctggtaagtcagatcaaactaaaaagaatcttcaagaacatcatgaaagaattgttgcaagattccatggtgttgcaaataaatataaattacctgatcatagtatggcagcaaaacaggcatatgatattgttcatgatgatttaacattagatggttcaacatctcttaacttagcatcatttgtcaatgttcatactgaagaagaatctgaaaaattaattgttgaaaatctgactaaaaatttagctgattgtgatgaatacccaatgttaattgaattacaagatcgttgtatttcaattattgcaaacatgtggcatgcaccattattagttgaagattcaggtattgaaactcctcatcatagtcaaaatttcagtagatggaagagtagagcaattggtactccatgtactggttcttccgaagcaattatgcttggtggtttagctatgaagaaaaattggcaatcaaagagaaaggctaaaggtttaccttatgataagccaaatattttaatggcatcatgtgctcaagttgctttagagaaatttgcaagatattttgatgtagaaaatagacttatcggtgtttcagataaagatttcttaattgatattaataaaattaaggaaaacttagatgaaaatacaattggtattttcgttattgttggttcaacttacacaggtggttttgaaaatgttgaagcaatttctaaactattagatgattacgaaaaagaaactggtaattggattccaattcatgttgatggtgcatctggtggttttattgccccaattatttacccaaatttaaagtgggatttcagaattccaagagttatgtcaattagtgcatctggtcataaatttggtttagttacagcaggtttaggctgggttctttttagagatgaagcttggttaccaaaagaattaagatttcaattacaatatttaggtggtttggaggaatctttcagtttgaatttttcaagaccaggttatcaagttgttcatcaatactataatttcttaagattaggtagggctggctattatgatatttttgacaattgtttgatcaatgctagattattatcattattcttggaagaaaccggatacttcacatgtgtttctaatttacatttacccgctggtatgagtactagagaccgtgatccaaaatgggatattagtctttcacaatcatttatttctgaacatgacaagttcaatgctgctttacctgttgtttctttccaattaaccaaagaatttattgaagattaccctgaaattccacaatctttaatctctactttattaagaaataaacaatggattatcccaaactatgatttaccaagaattaatttaccagaagttgatgagaatggtgaagaacatgacgatccaagtttacaaaatgaagtaaatggtgaaaacaaccaaattttaagagttgttgttaaatacaatttaactgctcaattattagataagttaatgcatgatatagctaacgttgttgaaatgttaatcaaatctgttgaattagtcagaaaaaatgttaaagatttaaagagtagtggtgaagaagttactaatgatttagtttacaatatgttattaagtatttcaaatgatggtgatgaaagattaatcaagttcaagaatgaagacaagaagactgacgccaaagttgtttgttgagtagttttacattcactcattttagtttgaaacttctccttttaagtatatttttttgattttatgcctacttttatttataatatatttattaactaccttgtgtattgagctttcatatttgatatataatttctttttacacaattaataaaacaaacgctaatcacaaaaatctcttaaccttagatttagccaaatttaatttcgtagtactctcatcaacatgttggttcaaaccgttaagaatttcattttgaattgacagttcatcattaactgcaacacctatttgtctttgtcttacaatgatttctcttaatgcttcaagattttgatcttgagattccattttttctttctgtagttggaataaatctttattatcgtatcttttagtttcttctgtttcttttggtttaccgaacgtcctgcgtgagcttgtaccagttgaaacatttgatgaaaataaagacgctgcaccttcttgtgacgttggcttagtgacggattccttaaagctcatattagtcatcattttagtcaaatcttggtattccttattcaatgacatcaccatttctttacgttttagtatctccccataaccaagatctttacaatttgataaataatctttaagtatttgtattttagtctcacctatttttaaactctttctggcacttatgatattaccagaattaaaagttttggttctagcatcttgcaataatgttttcgaaaatctgaatacatccatccattgttgagccgacattatttctgttattgagttatctgtataatcaatgttattatcattaaatccctttttagtatttgaattgttttgagtaccatcatcaatcatatccatttgcataaatactgatcttggtatattgtaaaacagcaagacatttgaatcatttcttaatttcttattgtttaataattctgatgtgaatctaatcagtccaagtttacgttcttccacttgagctgatgcactcttgaaaaaacttgtgtaccttgacggtaaaattgggatttcagactcactataacctgtgtcaattagccttctttttaaagtaacaaaatcagaaaatcgtttactcacaaggtattcataattatttagttgattaatgaatatttgtatcactaagtcatataatgtataattgtttatattagttgtatttgtaatatcaacagatattcttttattcgttgagctgccggtgtccattatgtatattgctggtatttatgtggcaagaactttataaattgaagaagaaaaccgccatttttgtgtattaaacaaacctgcctccatcagaaaaaaatatcaggcttacaaaaaattgtcacttcatgcatttcacttcttttgttcttaactagacggggttttatattagataaacagctaatttgtataatgagtactccatatattagtactgccactgttggaaatgcacataaaagtgatattctggatgttgaagttgcaagccgattcactgtcactgtttcatctgatggttttttgaaactttggagtaatgagagttcagaaagaagtttacataaagaagtgctcgttgataaagtcggtttacatcatgtttcagtacttgaagacattattgatatgaaaagagtaatgatttttgctttggggtcgttttcaggcaccctttccctatggaagtatgattttgacacagaggagttaattgatttgaattttgattataaaacaacaggtttgtcagctaaatcattattttggtttccaaaatttgcaatcggaagtggtgaaattaaattcatttgtacaactgtctcaggtcgtactgcagtttttgatgttacagttgaagaaggaaacccaacccttgattacaaaggtgaattatactcaaatgacaatagttttgctacatgtgtttccatagatatcgataataacagaattgttgttggtcatcaaaacggaaatttttacttgtatgatataaaacaattacttttatcatacaactttgaatctttcggaattaaaaactcaaagtcattgaatattgttagaagtgtcgcattctcaccaaatggggagttattagcgatagccaatgattcaggtccttatggtacaatctcattatacgatgttaaatatggtgaatacttaggagcttttgtaatctctacacattcaagtaatgttggagttggaaattttgcacattctaaatggtgtatgtccattgctttcaataaagatgggaagaaacttgtgtcttgtggtcttgataatctcataaaaatatgggatgttgaaagtagatcatgtttgaatacactaaagcttaacgccactgatttagaagatgaggacgttttgaagttagacgatatggatatttcagcatgtacatctgtaacatttgtagagcaaggtattttcaaagaagacggacaaaacgatggattggttgtcgttggttttgatagatcaatccgttggtttagagaagctggtggattatgattctgtatagctaaataaatgtaaaagatatatcaaaactggataacggttttttataaagatagtgatataatagcttcgttattttttactcatataacctgtacttatgaaagattcagcgtattctttcatgtaacgagtttcatcttcaatttcatcacactgtttcttttgtttgctaataagatatagaagtttgactaattcggctttagattctttaatttcttctttcaactgtgaatcgtggttttccatattaggtgtgtttatttaaaagaaggtcgagtttgttaatgattataaaaaaccgaattaattggcgatgttaatttttaaaaaactaatattcaagtcaatacacattttttttccaatatctaaaatttactcctattccccaatttttctccaggcaagatcaatatcatcaacaaaatatactgttctcatgtcggatgaaaataaaaataactcagagactttgaagcaaaattcagcaaatgttcttatcaccgagattgaaaaattgtcattagaagacaactcacaggatggaaagaccgaaccaacaaaaacaaaagttagcagcaaaaaaaagaagtctggcaagatgccaaaggatcaaattactccccagtatattgaaaaaatgagaaaggaaagagaagagaagaaaagattgaagagagaagctttaattgcacaaggtattgatccagacaacgacaacaaatctccaggatatataaaaagagagttagtaacaattccatgtaaagatagaagtgaaaacaataagagaagtgttgtaacgcttaagataatgacatacaatctgttggctcaagcattgatcagaagaactttattccctaacaatggtgatattttgaaatggggtaagcgttctaaagtcttgatccaagaattgaaagactacgactgtgatattatgtgtctgcaagaagttgattttactcaatataaaactttttggagacctgaatttgagaaattaggtttcattactaaatttaacagaggtaccgacaagaaccatggagttgcaatcttcttcagaagaaccttattttctttaattgacacatgtcacatcgattttgacaaagaaaagtctggtgatatcgaaccaagaactattacgaaaaacgttggtctaattttgggtttagcattgaaatctgatccatcaaaagtcttaataattggtacagcgcatttattctggcatccatttggaacatatgaaagaacgagacaaacctatattgtactatctaaatctcaagaatttgaaaaaagaattagagtactacatccaaatgttaacaaagtttggaaattttttggaggagattttaactcgcaaccatatgattcaccatatttgtccatcactagtaaaccagtcaaatatgataatagatgtaaaagagttatttcctgctctacgtcttttcaatactcaactcgtagagaggggggatctggtgaagaagaggaaggtggaaacgttgaaaagtttggtgagaatcaaccaaaagatccagtgcctgaatctttcgaagctacaaaagaacaagaattgcttgttgaaagaattgaaaaactacacaatagtcaaccattgcgtgcaatttctctctattcagtagcatataaacatattgatccaaaaaatgctggtattgataatgataggaatgaaccatttttttcaaactgggccaatgcatggcgtggtctgcttgattacatttttgtcatttgtgactgggatctgaaatctgataagagaggaaatgaaaagattgaaacatttgaggaagttactgatgttgttataaataaactattgaaactgccacatccagacgaaatgggacttggtcaaccgcgtgagaatgaatatcctagtgatcatctttgtttgatttcagatatttcattaatggagtagacttgtatatgaattatatatatatatatatatttattcatcacatatttatataactaatagactgtattaatagacacgatgtagaacctaatccagtcgatcgacaaaatagtttcccaaagaggaaataaacgatccatcagaaaaaatgggattcatgctgccaaaaatttgagtgtaaatttgaaaatgtaaacaaagcgagaacgaaaaataaatgaaacgcaaaatgtaaacagaggaattaaacgtgaagtttgtatatcagactctgataaaggtgtattctttatatacttgtactttcaatcaagacagagatatacaacagacaatatgagagaagttatttccgttaatggtatgtactgcactgtttcaatatgaacggtaccataattttcattctcttcgcaaggggtgaaggcaacatcaagttgaaacactaacgccattagttatggttccatttttaagttcttttatactaacattttgaatttcttttatactttttactatagtcgggcaagcaggttgtcaaattggtaacagttgttgggaattatattccatggaacatggtatcacacctgatggttacttagaagaaggcttaactaaaccaagaggtggtgaagaaggtttttccacttttttcagtgaaactggatccggtaaatatgttccaagagctttgtatgttgatttagaaccaaatgttattgatgaagttagaactggtaaatataaaaatttatttcacccagaacaactgatcaatggtaaagaagatgccgcaaacaattatgcaagaggtcattatactgttggtagagaacttttagatgaaattgatgacagagttagaaaaatggcagatcaatgtgatggtttgcaaggttttcttttcactcattctttaggtggtggtacaggttcaggtttaggttcattactgttagaacaattctcaaatgattatggtaagaaggcaaagttagaatttgcagtttatccatctccaaaggttaacgcgagtgttgttgaaccatataatactgttttaactacacatactactttagaaaatgcagattgtacctttatggttgataatgaagcaatttatgatatttgtcgtaagaatttaggcattgctagacctgattttaagaaccttaatggtttaattgcacaagttatttcatctgttactgcatcattaagatttgatggttcattaaatgttgatcttaatgaattccaaacaaatttagttccatatccaagaattcatttcccattagtatcatatggaccaatcatttcaaaagatagaatcaatcacgaatcaaactctgttaatgaaattactgcagcatgttttgaaccaggtaatcaaatggttaaatgtgatccaagacaaggtaaatatatggcaacatgtctgttatatagaggtgatgttgttaatagagatgttcaaaatgctgttgcaattgcaaaatccaagagtactgtccaattagttgattggtgtccaacaggttttaaaattggtatttgttatgaaaaaccaacacaacctgctgattctgagatggcaaatgttgatagagctgtttgtatgctttcaaatactactgcgattgcagatgcatggcaaaaaattgatagaaaatttgatttaatgtacaagaagagagcattcgttcattggtatgttagtgaaggtatggaagaaggtgaatttgctgaagcaagagaagatttagcagcattagaaaaagactatattgaattaggtgctgattcatttgttgaagatgaatattaattttaacaaaatataatataagtcatgtaaattactcattaaattaaaatcaattcaattcaattcaattcaaaataactttaaacttaaactaaaaaaggatagaaataacaaattaaaaaaaaaaatgggataataaaatcaaagataccaaccatcatttgaatcaattacttcaattttcaacaaaattacaactattcttttctataattcttgctatacacaattttttcaatttctacttatcaacttacagtctactaaacttttttggttgaacttgacgttaaacttcttttcatcccacctttgttttctttttcctccttttttacaacttttcatttagaattctctttctttatattattttctttttattatttaaatactgtttcttttaataatataaatcttacgtaatgttcgaaattcgcgccatgaaaatcattttctcctcaaattcttccttttcataatggaagaatgattatcctttgcttgacggacttaaaaaaaacttctccattattaatccaagctctctctgaggatagacaaagacattgaacaatattagagggtgtatataggctgtatattatggttgtataaagtgtagagtttgaaaagacactaaaaaatgtagaattttttaaagtagttaaagctcaatcagttttttatttcttaattcttcatcatcctcaataattctatgatgctataaatcaattaaacggattatcgtgctaatattctgtgagaataaaaaaaaatatattttacgcctttttttgccatcgataaatttgttcttactggcacttatatatcagtgatcattctataaagtatagttattgatttaaatcttgtcaagttaatcaataaacacttaattattactttggaaactttggaaaatattaataattgaccaactttttaaaaaattcagctttccaagattatctaacaaaaatttaatttatccaatattttgccttcgcctacatacatttacataaatatatcttttttttaaacaacatctacatattttccataataaaacatcatgattgaatcacccaataacgataaaattaaaaagactagaaacagagttccaacttcatgcttacgttgtcgaaaacgtaaattaaagtgtgatcgtcagaaaccatgttcaaattgtgttaagggtaaaactgaagacctttgcaaatatgttttcgcatcgaaggctacaactgaaacagctgtacccaaagttaatttaaataatgaagttattaaacttaagctgcaaattaataaactcgaaagaattattcaaatgaataatattgatatgtcagaatatgcagatattctacctaatgcggctaatgatgataatgatgaccaaagttatgaagaagatccattagtttcattatgtgataagtttgatactatgatcatcaaagaaaatagagttttacattcaggtacaacatcatatgctacatttattgttggggacaaaaatttatctaaaatttttgaagcttattctaaacgccatttaatgatttatgaatcttatcaacaaaagcaaaaaattaaagcatctgacttaccagttgatgtaagtgatagtcatttatcttggttaacagccaattcaaatgttgaagcaactgtttgtgatcttgatagtacatcaaatattaaatttggtggattgtcagctatatctgataaagtatcaaatatgcaaacgaagttagttttagatgttttgaatgatgttaataaagtcttacctcctttgtttgttgttaatgttttaattgatcatttttttaaatatgttcatccattaatcccttatattgatgaagaaacatttagggaggaacttacttatgttttgattgccatgcctggtggaagatgtagagtatccataactcatcttcaaaacgcatcaattgtaagtttattacttatagttttaagatatgcttatttagctgttaatgtgaaagactatagcgaggatattaaagctattggaaatgattttttggttgctatgattaagagtggggctgttattgaatcgaattttatactgctggctagaagtttattaatgtcattaccgggtgaagatagtatgtttaaaagagttacattccgtaatatccaaattttgttatttttaagactctatcaaggttatgcaccagagatgaatgaagaaagtaaggaacactcattaacattatcaattattattcaaatggttagattgatgggattaaatagagatcctgataatttcccaaatatttacaaaaagaactctgagaaagttataatgagaagagtatactataaactattatcgttagatgttcataactcttttgattatggttgtccattaattatatctgataatgaatatgatgttaagttacctacattaccagatgatcaaataaaaattttacatgatttcaagaagggattatcagttgaaaaatctggtgacgaaattaggaaacttgtatttgaaaactcaatcaataaagatattgccttagaatatgatgctattgttttactaagagagggattgaatgcatttcaaaattttaaattatcagttaaaacttcaagtttacataaagttacggataaaattcaaaatttccttgataacaaaattccgtcaatttgggaatatttacaagataactatgcaaataatcaattagaaaagttatttgatgttccaagagttaaaaaaattgaaattcgtataactgtacaaaccatgttaatggcattttattatttgatttatatcaatgaaatgaattctacctcagataatgaaacatcatcatctggtaaggaaactaatggaagcaatgaagatttatattttgatggtaatgaagacggtgataatgataatgagcataatgttagtgaaagtccaaattataaaaattcaaaaagtaaacattatcaaaaatatactgttagagcattcgaaacagcactttcactatttaaatttaattatgattatattaaatattcaacacaatctgttacattggatggagataataaacaatataaagcatttaaatttttctctgctaaatgtgatattttcattttaaatcgtgttgcggttacatttttgaggccatttctatttttatgttcatttttcttaaaaagtatgaatggtgaacaaggtttatttttttctgatttcattccaatgttttccaattcagttgatgcaagtgttgttttaaaatggtttgatattgatattgataatattcaagatataaatgttaatgatgaatgtcgattcccatttgtattatttcaaaaaataaaagatttattttttttaaattattgtttaagaaatgataattttgtttgttggagaaatactgttatgattaaattatttattaattattttaaacaagaaaataatccaaaatgttcagaatttttaaatccttcccatttatcagatcaatcaaagaaagttagtgatcattataataaacataccagttctaatagcgataccacaccagaattggcaaaagattcaccattgaatacttctaaaaccttcaatccaggaagtaatttaccatttgttgatgaaaattttcaaggaactggtgattttactctaaatatggcatgtccatcattacaaaataatggtgaaatatcaatggatgaaaatatatgtgttagaaatgatatggagaagaataatacatttattgatgattttttaaataatgcagttccaaataatggtaaaacagttaattttgagaatctaggaattaacttagatgatttaattgttgatgattttgataatatgattgaaaatatgattgaagataatactagacaattacatggtagtatgggattatttgatggaccaggaatattaaatgaatttgaaaagaatttctcagacaataataattacaataataatattgttaatactaatgatatgatgaaccaaacaggaattgtaaattcttcatcattctctggatcatcatatacatcaaatactaatccttctgatatttcttcaacacctgatattttcatgacaacaccacgtatgaatttaaattttactagtactgataagagttgattatatatgagttttacattttattgattagtatttgctggttcaaataaaattatttcaaaaaataaaagcaagtatggatcgttggcttattggtacaaatacacatcattttcaacgcttttttttctttttagtttgaattttaatttgaattttattacatcttgtttgttcctttttactgttcctttttaatattgattatatacctgtacataaaaaaactaaaaatgtcaaatctataaaaagaataatgcatatcgtaaaaattataattcaacattaacgaaaatataatctgaattttttataataaaaccttcttgaccaacttgtaaatttgaagaagaaacttttgatttcaatgaagttgaccaattagttacgtcccattttaatccatgagttgtaattattgtatcattcaataatggtagtattccaacatttctcatattatgtcttgatttaattgaattaaagccaagtaatttaaattcatcagattgatttaatttaggcatatttataaaattttcacctggcgttaataggaaaatcaattcttcatgttcaggatttaaaattgtaaaattaatatgatttcttgataatttatatttgtatatttgatgaataattgaaattgtttgatcgaatctaccacctacaccacctaatacaaaaatatcaattttttttagggaattttttgataaattatttaatttttcttcacaagtttccagttcatccagtgtatttaatgatttaagatcaatttgagggaaattaaaataagtatttattaaagaaacagatttattaaaatctgtataatattgagaagattgaagtaatttaatagtacctttatttgtataataagataaattttcgggagtagcagaatctaaatcacctataacataatgaggcttaattgatgatgataaattatgtgaatcagtgaaatttttcaattgatttataccaccatcagcacaaattattaaatctgcattatttaatatattgataaataattttggtggtatggttattttttgattaagtattaaaagtacatttgatgatgaagatgatgatgatgatgatgatgatgataatgatgaattacgatttaggaatgataatggatataataatgattgattagttttattaaaatggtgtgataaagaaattacatcatcattttcaataacgtggtccataattatatccgacattattccgtgtatagattaaggaaatgaaatagatattaaatcaatttgccaaagtagtggagtcggatacctaaataaataaataagtgaaaattattattatataacaatcacgtgtaattgtgaaatcgaaagagagaagactacgtacagtcttggaaatgaaggaaatgaaggaaatgaaggaaaaagcggaagaagcgaagaaggaaaaaattttcggatttagcatgcactaaaactaattttttagcaatcaaagtttaatttgctattatcttgctgtgttttaagattatcaagtgtttatcttgtaatagaagagtgtatggatacaactgttgttgaagtagagttatagagttatagagttatagagtcgtatacatacatgtctaatatgttgataatatctataaaaacgttctccatgtagatagtttaatcaccgagagagagtagataaatcctaatcgtaaactctagataaaataagtcaccttacttagatacttgaatcaattattttctattgtctttgaattatgtcttcaagtgtttttttaatttttactattatagtgactatatacaattatcacgacaatcatatattatcatttcattcattttttattgtcttttaaaaattatcttttcaacattatctgcatcaaattgtctctttcttttattattcttatattatatagtgctttttctccctgatatctttttctattttcctattttccttttcttctatttttctcttaaaattttctattttatctttcttcctgtaatcaaaaaaaaaagttttcttcaaataaatacattttcttataagcatatacccttatcttataatataacaatactaaaaaaaaacaattaaaacaatataacatagtacaaacaagatacccaatgcattttacagtcttggtttcattattactctcatcatttatctcagcttcagctgtaccaataagtaaagagtttatggatcataataatagtaacagtggtgttactactactaataataataatgataatggtgataaaattttaaaattaccaattcaaattaataataatccagaatttgttcaaatgttaagaaagagagatggtaaaattatttcagctgatactgatattcatcagattttattaactttcccaataaatattgctaatcaacaagttaatgttgttgttgatacaggttcacgttcaacttggtttgcaaaggataatataaataatttatgtgatttaaattcttgtattttaaataataatcttaatgaattagaaatttctaataatgattatggtatttattatacaggtaattttggtgcaagtggtaaatggtcaacaggtgaattatcaattaataattctgataaagttaattttaaatttggtttagcaaattcaattgatggttcaagtggtggttattcttggtcaggttttagttatgatattgattcttcattatcaacattagatgaaagtcatttaattgatgcacttaaattaggtaatgtaattgataaaagaattttcgaaattcaatataataaaatagatgattggacaaatgatataatgggtcaaggtgaattaacaattggtggttatgatgaaataaataaaaattataaatttttcgatatggttgataatgttaatatttttatgggtattaaaatgaattcattgaaaaattcaaatgataaatcaattgattttgaaaataataaaatgattgtatttgattcaggttcaacttcattatcattaaaacaaaaatatattgattcaattttatcagatattaaatatgatccagattatccaggtttctttgattgttcaagttatcaagattataaaattacattccaaattgatgataattctaaaattgaattaccattatcttcattatcttggaatagttatcaagaagattatgatctttgtcaattaatgattggtacaattgatgataattcagaaatggaagcagttttaggtcaatatgcaatgaaaaattttaatacagttttcaatattgatgataaaaaaattggtttatcaagtagtgatacaattatcttttcttagtttagtttgattttattgcttaaacttttattttaatttactgtactttaagttactatactactttactttactttactttattttactttactttaattcaatatgtataaccttacttcaatgttttattacaatgcttcaattttaatttaaatttcaatacctgaatgagagtactaataaaatttaactaattaatattacatacttggcaatatcgctctaaccgaatttccttctttattattcactactgcatgtatactttttatttttataacctatcatcaatagagaaaacttagaactttaattttaattttaattataatttgactaatagaaggaatagaggcttggaaacgaggtttgttaaatccttccataaagtcagaaaaagaaattaaaaaagaagctttcaaatacattgctataagaattgctgaaaggtaatattatttccttacgattaattttttaacggtcatatttatcaagtggatgcccataaataattaaaattttttattaatacctgtaaatatgttaccactattactcatttcactctaattaatactttgtgccctattggtctttgaaaaaccttaatagcaacaacgaactatttgaccccttttgaatgatcataatcatcgaattaattgataaaataaataaaacctaatctatcgacgatcatttattaagtaattcttgtaaaaatttatgaggtaatgcctattgcatattatcagcaaaattgcttgctattagctcatcatcactcagaggattaaaccgtatacttgagcctcgggtcatggcctaactgagtaactccgatggtcgatggaccagattaacgatggtcgaaggtccaccatttttgtatcattgcttgtcgagtattgacgagtgtatattattcgttgaatagttctttcttattcttatagtttgttatatgaaggtttgtattatattcaatatccgtatgtagctcttattctaacagattaagagtgaaaaggcttttttcaattaaccaggtagtatgagtgaaggaactaattataatcaacataatgaagtaaagtatgcaagaatattagggatgcaatctgattcgttggaagataagtacgaagagtttgagtacgatcctaaccaatatcaagaagtttcaaagtatcacagaaggttggatactagacgatggttggaaagtttaaaaatacatttaagagaagtaggtcgtcacgaaccatattttaacattgtcagaagcttattaaacatcagtgatggaaatgagttaataagtaatgatatttatggcttagatcatcaattgataactaatatgttgggtgatgttgttacagatcctatagaacgtcgactaagagtatggatggtgaaaaatacattgcaggagattgcatatagttttggtttcgatgaactggctggagaagtttacagaaattgtaaagatcacgatgatgtgaaaaagttgatggatacgcaagtgtattatgatgaggaagatggggttatgaatcttgattttgtttatcaatggtatatagttaacagatttcaaataggaagtgaaccaaatcatccaaaattagttaaatttgatagattgataagtggagaggtagctgaagagtattataaaaaagaaggtgtaacaccagattcatttaaacatgttatgggtgaatattttggacaatttaaagagctcatggaggatgaatatgtaagagaagcgtgtatattaaagttatcaggagctatcgcattacagaatatggatgaagttgcaacgaaagaatataataggaagatttctaaagaggcaaataaaattattaatgaaaaaagaatggctgatttggatggtttatggaaataactaaagttgaaaaagtttttgggtattaaaagtgcaagaggtaatggaaaaagatatgaagaccgtaacagaaggaaggaatatttcaaagtattcgtatgttaggataaaacttcattgatttttagatggttaattccaaataatgttcctgtttggtatttattgatgatttgccattgataaaaaaacgaatagaaaaaacataatctagagatgataaaataaaattatatataactcctaactgaaacttattgcaagatactaggcattgtttacaaaggatgcataagctgtaactcgacgagtatatctaaaaggtttgcgtgtaacttactgtataaataagtctctataaaatcataaaacaaggtttacgaacttcaatcagttctaagggtcaccccttaacgttgcgaactaacttattaattattcttattacaacaaatctgatgtcgtggatgatatatttttgtttttaaagtaccttaataatgctcaatgttgttaaaacttcatatatgggtgcttggtacatgtgttattgcttagagcaactcattgctgttgttgaaggtagaaaaattggaaaaaaagttatggataatgatttattttaatgtattttcattcatttttccaggttttgagttaaaagttataaaaatctaaaaaatctctagaacacaactttggaacacactaaatgtattataaaagtgaacgattaaacaatatacaattacatataagtatgaataatttatacatactaaataggaaagaacgaacatctatacatcaaacaggaaattgaaatttagcatatcatcattattgatgattaataatataaaataatcagcaatcaaattttaaacaaaattagtttattcaaaatttaacacctaatttcttgattttgaagctctattacgttttgatgaagatttagataatccttcatattcaggaactggctttgctaaaccaccaggagtattttcatcaaattcaatattctttgattgcaaatctttgattaatttttctttctgtaatgacctccatctagttatttttgcataatcatgaatttgaaatccaaatatttttggagtgaaaatatcagtactatgaacaggtacaagttcagggaatgtttgtaaaaacattgccgggaatgaagtaccaaaaaatgcaccatcaattgctgcatgtctggttgatttgggattataaatatcttcacaatttggacaatataatttaacactttcaactcttggtgtatcacttagtccaattggtaataatggagttaacttacaataaactcttggacaaaatccaaaatctccattcctatatttttcaagcattttatttaatcctctaattgtaataataaatctagcatgaattaatgcatataaaaattttgcattatcctctaatgttctcttaacttcctctggttgatcttcatttacttgttgacgatcacttattatatctactaatgtaccaactctatcaacgtattgattcaatcctgtcaaattaaatctatcagttatatattcaacatcaacatcacaaaaatattcattacccttgttacctaaaaaccaatcaatccaatattcagaatactcactctctgaatcagacacatagttttgtgaagccatttcttatttatattgtatgtttatttatatagatcttttactgaatagactaagataaacaaattctagtcaacattaaattaaaatcaatcatcaataaaattaacatgatcgttgccaataaattccaattttcatgatgccaggaaaacggccttttttcaacaaaacgcgagcaacccattggcttttttgttcaaactccccccagtgcatgcacagagagagagagactacagttgatttacataacaattctttaagatacttgtagtggaacaaactagtctacagtgaaaatatacataatatgtactttcataattgcttactacctccacaatcttcattgtttgtgactgtcaatgcaacaaatcagtatattgcaaccgctaatatagatggaaatatttccattagatcattagattccataaataatttatatgattcagttggttcagtaccaattaaaataaatgatacaacaataacttcaaattatgttacaaagacaatttataatgttaatccaacacctgaaattgataatgagaagatattaaactcacaaaaaattttacatacagttgcagttaggagtaggagtaaaattactgcattaagatatgcaaatttatcaacaaatgcaaatttacttgctgcagtttataaaaatggtgaagtttatataataacaaaccctcaagatccaataaaatgtcgaatacaacaaattttcaaacatgttaatggtttattattagatttctcttggtcagccgatgatcaattaatgtcatttgcctcaatgaataatgaagttattatttatgatgttatttatggtaaacaaattgctaatattcatcctcatactaatacaattgttaaaaatgttaaagatggaacatccgaggaattaacaactcctattaaaggtatcatgtttgataaaacttcaaaccgatgtttatatactttgggtgatgataaagttttgaatgttattaaatataaagttgttaacgatcatatcctaggtagaatttttgattataccatcactaatgaatttaatgatgttttttcaagttctaaattacataaagcttcacttaaaaaaatttcaactacttctgacgatagattaatttcaattccaaatacatctaagagtaaaagtttaaaaatttcattattatcaaaaaatgatgaaaatatatggtcaaaatcaaacacagtatttacagcatttggattgaaatgtttctcaactgctttttccccatgtatttataaaaattctaaaaatgaattagtttatatattagcaacttcatcgccagattgtggtatatctatttggagaactgattcaacaatacctttatatatctcacttgaatttacatcaccatcagttttagatatttgttggagtattgatggaactaaaatcttcttcactagatcaaatggtagtatgcttgttgcagttttcaataagggtgaatttggtgatcctgtttataaagatacggaactgtcatctgaactacttaagaaaactaaagaacttttaccggttgagtttgcaaaaatgacagaatggagaaaatttattaaagatcatcctagtcttgtagaacaaaaggaagaagaatataaacaaaatgaattgaaaaagatgaagttcaaaagaatagaaattaaacctgctgagagaaaagaagactctagcaccccagctgcaaacaacacaacgaagattacaataactgctaataatgattccaattcagacataaaaaaattaactaaagatgataaagttttaaacgacgtcaaaaaattaccattactggctccaagttctaataaagaggaaaccactaaaccttcagatgaaagtaaagataaagcggttgaaagtacgcaaaaatcaaaggatagcaaagagaaagaaaataaaaccagcacacaaaagacaggagctgcagataaagtaaagagcgaaaaagataaaaaggataacaataatagtacagttggcgataagaataaagacaaggaaaaagaaaaagaaaaagaaaagaccaaagataaggaaaaagataagggaaataataaacaaaagaaacaagacaaagatatatcagatagtaatggtaccacaacgaacggatcatctgagaaacaaaaggaaaacaaaagtgataaacctgaagtcaatcccaaaaagagagcattgccaacctctaattatgattcaccttcaaactgtgtttccaaggatttgaacaacaaagcatcaaaaatgatgaagaaagactcctcaaatgaaaacataccagccaataaaaagaagaaagaaaccgagcctgttgagtttgtcggttcaatcataatcaatccccaactatcatttagtaatatgcgtattgcaactccaagattaagaaacaacattttatttaaagttccagatgatgaaacactaatattgaacattaaaaatggtaacgggttggaatcgaatcctactaaagttacactttttaaacaaactctttcaaatgaaaataagcaaacttttgttgactttataccacataagattcacactgcttgtggatctacgaagtttttagcaatttctacaatcgatggccaaataataacatattctgaatcaggtagacgtatattacctccaatagttttaggtaatccattatcatttttggaaatgaaaggcaaatatttattagctgttacttgtacaggtgaattatttgtttgggatttagttttgaagaaatctgtatttaaaccaatctcattatacccattattacaaccactttattcatcaggtcaaatattatcaaccaatatgagcttaaactctactttagatggtaatcaaaataatcaaaattcaaatataaatatcgaggctaacggtttaatatttgttaatggtgagttattaacgaaaagtgaaaatttaacagtttgttcaatcacggaacaaggtatacctgttgttactttaaccaatggtaatggttatttgttcaataaagatatgaatacttggtcattaatcagtgattcatggtgggcatttggttcacaatatgcagatagttccttatcagttgatacattaaaagattttggattattagaatatatggaatcacaaacaaatgatcaaataaatagaagaggtaaagctaaattctttactaaaatttcaaagatgatgttaatgaaggaaggttatgaaagtttggaaaccgttatttcattgaatcatttagaaaacaaaatttatttttatatgttgttgaatgattatattaattataagagatttttaattacttataccaagagattaagtgaattgaatctaaagaatagattattagaagtatttaatggtttgtttattgatttagatggggaaatttgtggttactcaaaaaagaaacttttagaggaattaatcttaagttgttccaaacatagagaagttcaacatattcttgtacaatatagtgaatctattggtttgttaacaagggatgatgattcagatatagatatagtgtaaaattgattgttaatctataaatatatttataagagtttttgtttactatttacatgtacattaattagaataacttgacataccaacaagtttcataacatctctaagtgttttattcgcaacatttctggccttatcggtacctatatcacttaacttttgtagatattctggattactgatcaattcattatatttcctagcaggttcttctaattctttaatgactgcttcagcaactagtccctttaattccttctttgttaaatcttctacttgtttagtaacattctctatattatcgttcttagttgctgctaaaatactgattaagtttgacacacctggtctagttctccaatcaaatgttaattttccatcgatggaatctgtagttgctttattgaacttctttataatttcctcttttgagtcagttatgaaaatcttggataatggttccttatcacttttactcattttcttcaatggatttttcagacttagaatcttctttgttggtgttaataaggtatgtggtaatctaaaataatctttaccaacagttttattaaaattttgagcaatttctcttgttaattccatatgttgactttgatcttgtccaacagggacgtgtgatgcgttaaaagctagcacgtcagctgccattagaactggatatccaaataatcctaatttaaccttaccaagtgcattatcatcattgacagatgcagaatcttttaaattagcctttgatttccattgcgtcattctattcaaataacccatccctgtaaagcatgacaatacccattgtattgatgtaatttcaggaattgatgattgataatagacagttgataaatttggatcaattccacaagcaataattgaagcaaaagcctctaatctttgatcatttaaaactttataatcttgtggaacagtaagtgaatgtaaatctgcaacaaagaaatataattgtgatgaatctgagttattactgtcgttaacaaatgtatttaaatcatgccatgattttattgcaccgaaataattacctaaatggaaagtaccagttggttgcactccacttaaaatagttgaattcctaggtaaattaaaagctggatcagttatcgatacagtatgaactgttccagaaagtgaagagtaatttcgtatacaacgtttaagtgggaacatcgtttgcgtacgatagaatgagtacagtaaataaacagtaactctgagtcaatttgagtttgcaaataaattcaacttgaatttttcatgaaggcttttgacttttctgtctttacagttgcaactaacaacccacatgccacctatcgaggatttctttgcatttggaggcactgattttgcatctccacaaccggaagttacaccaagtaaaaaaaagaggaaagttaagaagaaaactaaacctaaatcagaagttacctctacaacgttatcatcaaagaccgaacataatgtacaaactttaccgcaaacaccatcatcacatgaagcagttgaagatccaaagctagccacagaggtgaatacttctgctattgctgatttgcttggtctttcatcatctgtacctatattaaatgaaccccaaccagaaaacagtataaatgatcgacatgaacgactaaaaaaccgtacaggcaacacaaataataataataatatggcagacactaaaatcaacgatgaagataattttctttcatctattgatgattttgtcaatactataaaggaaaagggaacagaaatccaaagtttaatagaaacataccaacaatcaacagttgaaataaatggtgaaaagattcctgctaaagcagttgtttttgaacttcatttggatattcatgcagctggccaagtgtctggtccgtatgatatgcaagttaagggatcaactaaaataagtaagattataaataaaattatggggttgtttaataacgttgcctcccccacttttcctgaaactgaatggaacgaattagcattatacgttagtgatataaatgttgtgttcaaccaatcattacgatgtacatcattattaacttaccaaggacagttgagtaaatctgatattgttaaaggatttaatgttcatgggattattacaactgatgaaaatgcacgattgttatacgctaatgaaagggcaaagaaaatgagtgcagtgaaaacagaagatgaagaagaagaagataatgagaatgggttatataatgttgaaatcgaagatacgatacgtggcggaacaaacagtgtttcggtcgtttcaaatatgtcagtctctgaattattatttatgtataaatataaaatgaaattaccaagtgaattggatttaaaagttcaaaaagaagataaatttttaaatgttgatgaatcattgaaaattaatgaagttgtaaaaaatgcagtgttgaaagtaacttactctcttgaggaattgagtaagctagaagaggaaatgaaaagcaaggcagctaatgagggagaggacgatgaagatgatgacgatgacgaagatatcgatgttgcaactaaaggaaatgaagtacaggaaattggtagtggaggaaataacgaagagtattttacaattttcattgcaggtaaggataaaaaacgatataaagttagagttaaaccaagtacaaagatcagtgaaatcagcacgttttataaaaacaaagctggaattacagaaaatacatcattaaaattactttttgatgatgaagaaatggatatggacggtgtagttgcagatacagaattagaggaagattttatgatcgatgttattgtttaaaattacaaaaccatgtaagattatgtacaagttgtttttatatataaatgctatcctattgaagtcttttaatattagataaatcccaccctttttccttcaaataaccgccaattggtccattatccttcatttgaagattattcaaatcaggtttaccagaaacatcagtaatgtaacgttcaggaccacaaatgaaagcaaatgaggaaagtggagttgacggatttgattgttttttgaagaatgtccattgttgataagcattatcagctcttatctttgaagttgaaggacgtattactgtctcagaatcgactctttcaccagatgatgaatcaataataaccaaaggtttttcagtttcctttggttcttctaattttgaaccatttatttgattttgaacttcaagtttcttttcacgtaaaagtttttgtttgaaaacttcttcactaatatgtagatccataccacctgtaaaatttggtaatgtcggaggatttacattatctattgataagcgttcatttttagatgattgcaagtaatgaaatttaactctaccacaattttcagcaaagaagctaagagttttcaattgaggtaataattcagattcatccttaagagaataaaatacatcaataaatccctttggtggatttggtgaatataaaagttgaaataatggcaaaatacctgtacctgcaccataaaatgtataattttcaggttttggtaaattttcaggccattgtggatcaggttttatagttgataaagtatttgacatttgtggacgttcatcaattctattaagtggatgatatgggaatttataatcaataattggacctctaattttaacttcatctagaatatttttatttgttagccatttagaaaattcaccatcattataacgtttcacaattagaatgaatttaccttcctcttctaattctttgactagacgaagatgaggttccttagttgttggatcaatacctgcgacatacattggtaatggagtataatttctaacaatatttatatcaggttgcattacttcaatgctccagagtttatcaccattaaacaattgttcattatgaattaatttttcagctctattctttctagttaattcaattaaataatgatcatcattaattttatacttaaatgatattatatacggtaaaaatttatcaattttcaataatgcagtatcatcatcaacatctggatcatttgtattggttatatatttgtatgtaaacattgcccaacaaatacctgtacatatgattaaagaaggtaataattttctaaattttgattttggtttaatacgttcattcaattgatctttatataattgttttggagttttaggtgcattaaattcaaattttgtatctttagtattaagtaaaggattataaatagttttatcttttgttaataacgcctttaaggatggatccattgcaggtaatgaagctgaaggttttgaaacttttgatgaaatatctggattaaaatgttcatttaatgtattaatatcagctgaattatttgtagtttccgttatttttagtatttttgaattatttttcccatttgatggaggtgttggaggagttggaagattagaattccaacgtttgaataggatatgagacctacgtatcatgtaatggggtttatacatgtcgattgatggttgactaagagctgttttccaaagtagtgaaaaatctgagaaatctggaaaagttcaaatttcgtttatcatggacgttttgagtaatctactgtaatctctttcttttcctttagtttatatattatacatatcatatagggataatgtcattagagaagattggtagcgtgcaagcacacgcagagagagtctgggacttatctactcatagtgggattccattattagctagttgttcaagtgataaaacttgtaaattatttgatattagtaatggaattaaagaagttagtaaattagatgaggaaacacatagtaaaagtattagaagtgttcaatttaaatatagtaaagatactacatatcctacgttagcattaggtagttttgattctacaagttcaatttggggagcagatgattttaagagtaaatgggaattattagcagttgttgaaggacatgagaatgaagttaaatgtgttgattggtcaattgatggtaaatttttaagtacgtgtgcacgtgataagagtatttggatttgggaaaccgatgagttaaatgaagaatttgaatgtgttgcagttttaagtgaacatgaaggagatgttaaatttgttaattggaatgataaaggattaaatgatgatcatacatttataagcggatcatatgatgatacattacgagtgtggcgtcaagatagttatgatgaagatgaatggaattgtgttgcaaatttatcaatggatagtacagtttggagtgcaacatggattaataataatacaattttatgtggattagatgatggtagagtaattcaatgtattagaaaagttgataataataaagatggaattgaaactgatagagataatttaccaagtacagttaaagatgttgaagattggattattgataaagtttggtcaaaacatgaaggtagtgtatatagcgtatcatgtaaggatgatacagttgtcagtggaggatccgatggagttattagagtttacaatttaaacggtgatatattagcagagaagagactggcccatggtacctctgaggtcaacgttgtagcagttgtgaaaacaggtgtagtagccagtggtggtgatgatggggtagttgctctgtggaaggtatagtgttgtatagtagacattacgtaattattaaaagatataatctttttatcaaaattttcacttcttagccttttaaggtaaagtaaggtttattagagttataataataatatatagggggtagtaagtatgttaaagaagggaattagtgttgcaagtaaggtagttaagcctagtgttaataaaagtgtaaaattaagtgcagcagagataatagctaaggcacatagtggaccaacatatgcatgtaagagaccaattgtatggattgattgtgaaatgacaggtttagatcatcataatgataccatattagaaatttgttgtcttgtaacagatgagaaacttaaagtgttagatgaaggatatgaaggtgttgtacatcatgaacaaagtcaattagatgcaatgaatgaatggtgtattattcatcatggtcaaagtggtgtatcagctagagcaagggaagcaactactacaaaggaagatgttgaaagagaattattaacatatttacaaaaacatatgcctaaaggtgttggtatacttgcaggtaatagtgttcatatggatagattatttatgttaaaagatttccccaaagttgttgaatatcttacatacaggataattgatgttagtagtgttatggaggcagcacgtcgtttctgtccaagtattttagaggatcaacctaaaaagaagggtgcacatacagcgaaggaggatataatggattctattgcacagatggcctatttcaaggatacattgttcacaatcccaatcaaagatacaataaaagataaagaaacagtcggtgattcatcatcaccatcatcatccaaagcttaagtaataaaaagcgaaagaaagagtcggatgatatcgatttgaacttctcacagtgttaaaaaacttaattatgccatcaattaaataaagtgtgtaaatatgaactctctcttaatttaattattgttgtattatgaaacgaaattgaatgcatttttctttatttccgattagtaatatttctcttttatttattatttacacacttcatatataccatataccacctgtaacaacaatgaataatcaaccattctcttttgagaactttcatcttgacccgcaggattttcaaaactttttacttattaaccccccactaactgaatattctaatcgttatatggctcaacgtggtgttgaccaatttttagatgataatatgttaatggaaaataataatgtgatgatgcaaccatcacatcaacaacatttacaaccacagcaacaacaacaactaccaccaacaacacaacaacaagctcaacaagcacaacaaccaatgtctttacaatcttcagcttcaatatcagcttctactcatcataatcaatatcctaacaataataataataaccaaccttattattccattccattaaatcattatactgatagtaatgacttaattttaccttcaagaagattatcaatttcaaatggtcaaattggtcaaattagtatgatggttcatcaaaattatgaaaatgataatgactttgataattcaacagtttcttcaaatgatttacaatttaaggaaaggaaaggtttaggtccaggttctgcacctgcaagtggttcagtagattttatttcaaatcaaactcaaaataatggaactactaaaattaaaacagcacaacccgatgtaacattagcaacagtaaaagagccaataacaacaacagcaacagcaacaacaacaacaacaacaacaaaggcacaattacaaacagaagttccaataaatggtcaattaccaactgcaccatcatcagcaatttcaacaaaaccaggtcaagtatcatctggtgcttttgaaactgatcaaaatggtgttccaacaagaaaattagtttataataatgaagttatatttaatccaaatgaaccaatacctggtacaaatgcatggaaacgaaataaaatacttgaaagaaatagaattgcagcaagtaaatgtcgtgcaaagaagaaaaatatgcaaaaacaattacaagatcgtgttgatacattaaattttgaaaataataaattaaaggaaatgctttatgacatacgtacaagattaattaaatatggagctgaaagtaatgttaattttttaactttattaccacaagatcctgaacctgatgatgaagaaattgatgaaaatgatgatcaaaataataataatgatgacaataataataataataatggaggtgatgaattgaaaaatcaaattgatcaagatcgtaaaaataatgatagagtagagaaattacttgaacgtcgtcgtgtatttgaaaagaaaaagattgttaataaacgtgttgatgcatttataaagtccggtgtgttgtaatcgaaagactttctttatgctgtgtaatatcatttttataaaatttagatattaagtaagcgataataatattaatcataatattaaagccacaaataataatactcttctctcttctatacatcaacaaaatatgtcaggtatatcgttagatgatttagattggaaggaggaatgtgaaaatattggtagagagttacttaaaataacaactaatataaggaatggtacatatagtgatattgatatttcagatataaagaaaaggatagataatcttgaaggtggcgatgaatcaaggaatgcaattgtaaataaattaagaaatgcattagatgagatagaagatacccaaaataaacaaaatacccctaaaataattgaaaataataattatatagatgaatatgaagcagaaagtgaagaaggagtacaaccattagaatcaccacatcaatttcaagttcatcaagatttaattaatgaagatattgaacaacaacattgggaagcagttgaaagagaagctgaaattgctagaattacaaatactgttagtgatattaatgatatatttcatgatatggatacattagttaatcaacaaggtgaattaattgataatattgaagataatatttataggacagttgattttacgaaacaagcaaataatcaattgttaaaagctgaaagatatcaaagaaggaaaagtagatgtacatgtattttaacaattattgcagctgtatttataatgattttaattttattaattttataaaaataaatattggtagttaagaagagttttatgaataagataagaatttagaatttagattttagaattagatttttttaccaaaataaacccattgatcctttaatggttcttcctcaagtggttcccaagctttccattcagccatttttttagctaattctaattcttcatgagcttgaattacaacttcttcaattaaaccacaacctatttgattttcaattttttcaataacttcattattttcaacaattttcaatcttgaatttgttaaattttctacacttgttctataaactgattcatttgggaatttttcctttaataaatctaatgttgcattatataatgaaattaatgcaggtcttggatttggatgagtttgtaaacctgtaataccagttggattacccttacctgaacgtacaagaacaggagttgcagcagaagttgcttgtcttaaaagtgaagtaaatctcattataatatccttattaaatgaaataactaaagatcaaaaccttggattactctacacaatttctcattggtgtgtaaatttaatattattttagaagtatacaattttcatgaagaggggaaatttacttagagaatacgtcgatcgtcctgtatccatttagacgatcgacgcgggtcttaatataaatcatctaataaccttacacactcattaagtgcacaactgactgataatataccctgtctagtaatatctgcaactattggtgcctgatatacactactaccaactataaaataatcttgtaatatttcaacatcatcaacaactccaaatcctggtccaccatttaaaaattcattaattgtcatattttcaataggatttttattaaatgcctttgatccatcaccattcctcatttgacgtcgtataatccataaatcaggttctttaaccatatataaaacatattcaatacctcgtaatttacgtaattcagaatcaaatgttggtataatcattaatgtaccattaaattgtctttgcattttcaaaatttgattattacattgtctatcccaaaatggtgattgtgaaaaatattcaagtacattatctgttcttaatccattaatattgatccattccggtgatctccattcaacttcatctaatgctgccatgtgtatatagtctgtgttgttactgtaaagagaagaaagacactatcttaaattttacgtaagccaatcttgatttttcatgtaatttttcaacatcatgttaatttgaaagaaagaggtttaaagtaagaatacttccattatttcatattccctttagacaacaatcatataatgttcagagcctattctactaaagtatccaaggctattcctaaaccttcaaatgaaattactgatgtttcagcttttttaaaatctattggacgtaactgtgttgaatatgttgaagcattcccaacttgggatgcattatttacttcatcaggtagagaaatgaaagctgcaggtattgatacaacaaagagaaaatatattttacatcaagttgaagtttatcgtcaatctggtaatgtttcaccaactcctttaagtaggaaaattaatggtggtgaaagaaaattaaatcaacatttagcaaagaagagagtgcttgaaagaattcaattagcaaaagatttaaaagcttttagaaaacaacaaaatgctacaacttctctttacaataaatttgaaaaacttcatgaaaatgaaactttataaactaataaattaaacattctaaataaattattataatttcatgtaaatataacatatacatttttaaatattaaatataaaatcattaaaacaaaaactttccaaaatgtaaaacattttaatcaccaaccctattctttaattatctcatctgataaccattttgcttcattttccataacttccattgtacgttcatgtcttttactatcatcagtttccattggttcacaaacctccttccaccaattattcatattttttaacatataaccttcactctcttgtaataaattataaattccatctccatatccatcctttaaatatcttggtattatatgacaatgtaaatgtggtacactttgacctgctgcaattccatcttgaattgcaatattaagtgaatcacatgaatatatcttctctattttactacttataaatttaactgtttgaaagaaatcattagtttcctctatagttagttctgataatcttggtactttacgtaatgggacaattaatatatgacctggtactattggctttaaattaactaatgcataactatattgagttttatagaaaacttgttttgaaacattaaatgtactgaaaaaaattgtcattgttatggttcatatgacatgtcataaaagtttaatatgaaaagttgaaaagttagaaagttggaaagaaattgcatgtctttaaatgagattgaaaattataacgtaaatagaaacctcacctaaagtaaatttaatggcaaaacattaacatggctttattaatttaagttaatatttatatttatctctctaaataccaactctttcgcattcattgaaggtgagtatgactcattacgacacactcggaataccgagtactgcatctgatgcagaaattaaaaaagcttatagaaaattagctctaaaattacatcctgataagaataattcaaaacaggcagaggaacaatttaagttagttaatgacgcgtataatgtattaagtgattcaaataagagaaatgaatatgacgcatcattgaataataatagatacaattcaaaaaattattcaaatttcaatagttatagtaattatactaattttaatgattttagtgctgatgatttattcagcagatttggtaatatgtttaatgattcaagtccaagatttcactcaaatactagaaatggacatttttctcagagacaaaattatgattatacaagacaacattattctgaaaatcgtcgacaacgtgataatgaacaaaagcaaaaacaagaagaaaagaaaagagaagaagaaatcgctaagcagaaagcggaagaagagatagaaaataagaaaagacaagaacaagaacttcgtcgacgccttgagatacgggataagaaaataaaactagccagagaaagagaagctgaattagcacgtaaacgtgcaatggaaattgaagaaaatgcaaggaggaaattggaagaagaaaatagtaaaaacaacaacaataataataacattaataacaatactactaaaagtagatttggttttagagatgaaagagaagcaaaagcagattttgatgatttagaggatagtttagaaggtgatgatagttttttacataatgcaacttatatgggtagatggatgcaagaacagaatgattttgaaagtttggaacctgaaaatcatgaatcaatacctgatgttgatgaaattcctgatatttcagttgaagatagtaatggtttaaatggtaatatggagaataatcaaaataaacgagccacatgggcagatgcaggtggatttggtgttaataatgagtttcagaatgatgctcatattgatgttgatcttgatgctggtgcgtatgccgatgctgaagatgatggaagtaataataataatgttaataatgatagaagctcagacggaagttcagatgaaagttcagattctcaatcaaatgatgaaagtgatgatgatgagagagatataagtcatattgacgaggaacattcactttataatgatggtaccaaggatgatcctatagttatcgatatagccgatgaagatccaaattcaccaccattaacatcaccatctccaagacctggttcaccagagaaaagacgtgcatcttttgacaaacgtgggttattcagagacgatcgtcaaagattcaaaagaccaaaacaagtaactaacagtgataatttaggatcacaggatatactttgggaaacttatatgcaattacagaatgccttagatggtcttcaacatggtattaatgtgctaccaacaacggttttaccattatttttaaaatacgagacacaatttttgcattttttgcaaaactcacaaccagttccctggggacagtatgcagaagtggcacaatggcgactcgcagctgctcaacaatggggtagctatctctagaatagataatatgtagataatatatatgtcgtatttagtgtacttaacgtgtaatagaatatagtaatgcttacataatacaatatccaaattttcttaacttaacagtggaacaagagtactgtatatattcatcaactattactactgtacctcttcttctactgaacaatggactctaatacccctactacgtctcgagatgtcagactcttgcgtctactctttgcagcacagggagtcactgcatatgaggatcatgtcccattacaattaatggattttgcatatcgttatacttcacaaattttacaagatgcaacagtgtataatgattacgctgcaccaaatggtaatgaaaattcaaatgataatgataacaataataataatggaaatgatgatgatgatgcaactggatcatctactttaactaacgaagatatacgattagctattgctgctcgcacaagttatcaatttaaaccaataccaccaaagaaaatgttacttgaattagctgctgaacgtaatgaaaaaccattacctgctgtcatgccaatgtggggacttagacttcctcctgagaagtattgtcttactgatgaacctcttaaaaagaagaaaaaagtgtaatgtgtaatatatagtgtttataaataagaattggttttttaaagtgtgtttatgagatagtgtagtatttactagatacggatatacaataaagtgttttaagaaaggtataaaatccatgtgtcatgttgtaaagatataggttatttgtacaagccaccaaactttcaatatcttgaaattatatttttcgaatgtttataattctcaacccgacacaacccttatatacttattttctcttcaatctttcaacaaacaatgtcaatggtcacacagatgtccattcccgaagtcttagacagggaaattgaaggtgcaatcaatgatagaactgcagttttatcacaaatcaatgatttaggtccacctgatcttgtcactttaacgaaaatcattggtactcccactaaatcatcaacacctcaatcacttcagacaacaaatacttatttttattatactggtgttgatacttcaagtgttgcaacaattgcagcactactcaattcattgaataatattatttcagagaaacctcaaatgtggtttggtaaacaaaaggcatttcatgtatctcacgcctcgtattcaacttataatgcatttagaagattagatatgcgtgttcacgttgcatttccaggttcagttagttggaaagttactgatggtcttgaaaataccgctgattctagtataattaatgaagaagatgcaaacgaaatgtgggaagaaactttcatgtcatcaatggttcgtactttagttacttcaaataatgatgatgaagactttgcttcaattgttgaattaagaagaattaatccatttctagattcaaaatattcaattcctctctttttatcagcttttaaaaacttatacacaaagggggaatatttaggttgtaatgaagattcacaaaatcctacaagaactaataactatatggttgatgcatttttccaaatgattgaactgactcaatgttatgatgaagcattggatgttttaaatgaactgtatgcaacacatcctgaaattgctcctcttgttgccaaattattatttgtttcaaatagggaattagatgcagttaaatttattcataaaacattatcatccgctaaagatgttactgaaatcccaggatcttctaatttacttctcttacaatcagaatactgccttgaaaaatcaagacccgatttagctttgcctctggcaattaaatctgttgaaacttcaccttctctatttgcaccatgggaaaatctcgttaaagtttatattgcgctgaataaatttgaagatgctttgttaactcttaatgcatgcccaatggttactcataaggataaatatgtactcaagagaattgctattggatctgcagcaaaattgaagaatgataccaatgaatcaatctacacatctcaagctccatcacctaacgatttacatttaccattaccgcaagatgtgtttttaagtggtgttactgatctcagctctcaagaagtcgcagctgaacatgcacaattattaaagagtaaaaatgactcaacttcagatgctttaactcctcataaattaatgactttacctgcctcaagtttgaaatctactttccgtaaggcatatagtctattatcagaaattgtacataaaattggttgggaaggtatgctgaaccatcgtgctaaagtttttgttatggaagaagaatactcaggtaatccatcgcaagaagaggtcccacaagcccatccatctaatgaattccgtcaaaagagactatgtgaaagatggcttgataacttatttatgctgctttatgaagatatgaaagcgtacacatatttccgtacacaagaaatgcaagctgaatcaatgtcagataatattgaagtcaataataataatgataatggttataacaaacactcaactttatctgattatttaggattatggggtaataacaatattaagaaggaagaatcagttcaccaaattaataatggtgaaggtaaaatgaatttagatccatacactcaaacaaaaacttgtctagaatgggaaatgattggtctagtaagtgaaaggttaggtcatataagagatgcacagagatgttatgaacgtgcacttgctcgtagatttagtgttagatcagctaaaagattaattggaatttactctcgttggagaaatcatgttagaaaacaaattggtgtcttgggtaaattaaaccataattcaaacgatagaggattaattggacaatctaaatggaatgcttcaatgattagtttacataataatcaaagtcaagccaatagaactattaaagatccagcaaaatatgatgctgcactactgagattaattgttggtttattggtatgggattataggtggtactcactattttctccattattactttctacattatctgatgttgttggtgatttaggtgagactaaaacaatcagtgaagttcgtgtttggtttgatgaaagtcacggaaaccgtggtgttgtagatttagtaaacgttgcattacaaacattaaatcgctggggtagaattgaaatggatttataagttcatagtattgtttatgtataccttttgtaatcattaaataaaagcattaactttagatcaccacaatataaagaatcaaagaaagaaaaaaagaaagaaagcaagtctagataattacaattatcaggtatgcacgcatggcatgaatttgttcactgagtgaaaatcaaaatatcgctacgtttccagttttcagcattacaagggacaacatcatcttaacaaacaatggtatcaataaccaacgcacataatgatttagttcatgatgcagtgctagattactacggtaagaggcttgcaacttgctcatcagataaaactattaagattttttcaattgaaaacgatcaacataaattacaagaaacactcacaggtcatgaaggtccagtatggcaagttggttgggcacatccaaaatttggtgttattttagcatcatgttcatacgatggtagagttttgatttggaaagaggaaaatggtcaatggactaatgttgctgaacatcgtgttcatacagcatctattaactccatctcttgggccccagttgaatatggtgcgttgttattatgtacttcaagtgatggtgattgttcaattattgaattcttatcagatggtagtactaaaagtttcaaattccaagcacatctgattggttcaaatgctggtacttgggcaccatgtattggtgatggtaaagatttcacaaagagaagaatcgttacaggtggttgtgataacttagtaaaaatttggaaatttaatgaagatggtactaatgttgttttagaacatgtattacaaggccatactgattgggttagagatgtcgcatggtctccatctaatttgggtaaagcatatattgcaactgcaagtcaagatagaaccgtacttatatggacaaatgattctaatgattctacaacaccttggaaaaaatctttattaaccaaggataaatttcctgatgtttgttggagagcttcatggtctttaagtggcaatattttagctgttagtggtaatgataaggtttctctttggaaagaatctttaaatggtgaatgggaatcagctggtgaagttgatcaataagtttatttatcaatttttcttttattacaggcttatatagataaataagtaaataaaaaaagtaataatctcttctatttggaattaactagtcaaaattaggattaccaaacatactaattatcattgtaaatctttccttccaggttttaccatcatgatttatttctcgtatacctctaccatcacaaccaataagtgaccatacataagctttcaattcaagtcttaaaactgcaaattttacagctaaatatcccaaattggacctttcaagtgaaagctcataatatctttttgcaagatttaagtcttgtgcaacaccaattccgaattcataggcccatcctacattataactaccaagatgtgatcctaatgttgatgcatcatagtaatatgaaattgcttttttgacatctctcggtactatagcaatttcattggtatatgtggaactatttctcagaagtccaatacttctcaaagtcaacttcagcggagatattattttatctatagtttcgaataaactgataagttttggcaataaccaactcttttcttcttcttcaacactggaaagtggaagaacgtattgccaccatggtctattatatagcgggtctgtttggatttgctctgtatatgatggatacaagccattataatataaatctccaagatagttaattgaatctctgttataatgttttgcactaatttcaaggtatgaaatagcttctttgaatctctgagcggtgaaaacagtggaataaatatcatcagaatacctatacttcttagatgcaaatttacctaaagttggccataaaatcacacctaatgattgttgtgcattagcatatccaatttcactagcaattgctaaacttaccaaaccagtccatattttattgtcatcattttcaggttttgaatttataaaggagtagaaaggtaatttgaaatcaaagtataaatgatccagaagtttgacatatgagttatatacaccagatattgacttttcctcagtagtatatcttccctcctcatatagctggattaatttccgtttcgcaagcatattatatggagatgcagtagacagcattgtaatgattttctcaggaattatatcagggttctctgttttcaattgtgtttcaaattcatcaatcaaatgaagtgccttataatatcttggagaagcatatttaattccatcttcatatatttcgagagcttttttcttatcagcttccattccaagtccataatagttgataattccattatcacttaaaaacggttcatttccagccaagttcttgccgatatcaatataatgtttagccaaatcataattaacttctgtaccttcacctcttaagtacatatgaccaaggtattgtgcacatctaccaacaaataaatctaaaggactcaaatcttcaccaaatgaaatctcaaacttgaatccactactgctgtccttaaattcttctttagcttgattaagtttttcaacattttttagtgattgtgcaacatcaggttccaaaagaccgttactcacgcagagattagcaaatttaaatgccatatcataatttctggcgtttagatagtcaccattataatgtttttgggtttcaaagtatagtaaactgtatgcattaagagtttcgtcttcatccgcaacataatcatcatctcccagtgatcctgtacccatttgtttgattttttcataatcatcaaatgtttcaaaatatcttaaagtatctaaagcttgagttgcaggaccaaaaatcccatcttcaaaatcacaccatgatacatcaaatttgttcaaattataactgaatatcatttcttcaactatagtggatggtgttttttgaacatttaacatcgaagagccgattttcccttcaattctttccttaatcaaagagaaatagtatattgcttcagaataattttcaacaacattaacagcaaacatatacttatgtgctaatgtcatttgtgcttgaatgttatttagatcagcagcaaatcgataatgaattaatccctttgctggatctttttcaaaattcccaaatactcctgtagagtatatcacacctaacatgaagtgtgcatggccttcaatttcagcactgacattgggtaattcattaacaattctcaaatatagagcttctgcttgttttacatcaactggggtgttatagagcccgaaaaggtttatatcagccaatattctagctgcttctgaattgttttcaatttcaattaatttatttagttcatcaatatgttcattaactgttttatttactattgaatggtcaagtttcaacggaccataagggaacttaaaatcaattttaccatataaatctatatcttcataatctaaaaatatcgattcactatctggaatttccagcatatatcctgagttattttcattcttcatcttaggacttgtagttttgtagtaagggaagtaatcatgaaaaaatgtatctctcttgatttcagcttctgatggtacctgataatcatactgtacggaatttttaattctatatttttctttcaattgttcaagtacatcgtgtggatctatggatacaactgacttactcagtgccaccgatatcaatagagtattcaaccacttcattggtttaaattaatttgtaaaagaagtaataaaagcttgtgcatgtaacgattaacgaaatctcaaaaattatgtgggggttcaaagtttgccagctcatgagctttttttcaatattttagtttatatatgccaatggaatgttgttcaatatcaacgatgccaaagtagcatgtgcttgtatgaaatatagtcaatcatgccattctgtaaggtcaatgaaatattgtgaaacttgtaaaacaagaaaatgtttgttttgtacactacaaaatgttaaatcaagtagttgtggtaaatgttcaaaagaatacaattcagacgagagttattgttcaagatgttatgtttgtccgaaatgcaatgctgatttagtgacaagtcagtacttgtataaattaaaagaaggtacgatggatacgtacgagctgattaggaaaagagaagataaagataaatatattggtaaatccgttacattcaaatgtgcatgtggatacaagttctcaacaggtgttggtaagaaagaacagaaactacaggaaatagttatggaagatgtaaagacatgtcaggagagacgatatgatgaattggttgaatattataaatgggtactgaattatcatagaatagaggataaaaaggctcaaattcgatggaagagtgaaataatggagatgttcagtcattttgaaatatcgaaagtgttgaaaaatgagtatatagatgaactgaataaacgacgggaagaaataataaagagtagagatgactcgattgatgggaaatatccagttccgaaacgattaactaagaagttcagtcagatatgtgtctcttgtttgagtaatgtcagtaatacacctttaagtgaaaagattcctgttatttatacaatgcccatgattggtttttcatttgaaaaagtgaagaatttagataatgaagagacatgcgatgtgcctatattattatccataatgaacgaaggagttcagactaaagttgaatatgaagatattggttttgagctaaatagtagtcaaaagacatttgaacatatacccacttgtttattatctcaagttaagggaaacgtcgaagagtgtaaactagagctttccaaacgtgatccatcgatattttctaaactcagttatagagagggtacaactgttaaaataatagaacagggaacgagttggtctactttgctaataaatgttacaattggctacaaacaaaaagaatttgaaatacaactaactttcaatgatgaattcataaactattgttgtcatttgtaataaataggttaaagattgtaaatcctacttagtgttaagattaggtaatacaatatcctattctgatgaattgaggatatgcctcgctacatggaaatcttgggttcatgacagatattgcttacgtggcaattgatcaatgtctagtggtcggtgaattgaataatggataatagttgatacggcattagtaacgggagtatgagtttagaacacagatatacctagtagaaggtaatggaaggtcttggaatggttgatggtaaatcccgcaagacgtgaatgaatggatggcaaattccagtcgaggagagtgtaacttcatgttactaattttagtaaatgccgtatgaataattggatacagtttactatatgagtgcaagtacaatggagttatactggtgacgtggaattatctagaagctaagtagtagctcggaaaaacggggaaatgctagtaaggaaaggagactgcctgaacgtgtgattatatataactgccctgtgccgccgatagttgacctattggtgaagagagatgtgaacagaatttgttattggattttctacttggacatcgatcggaaatcgaaagatatataatcaaggaaaactaattaacaagttaaccatcgtctaagctgtctcattttatattcaatttattttatattatttatagcgacttaagattacttaattaaaactcaatacttagtactacatattttagacgctaaaaaccgcgatttttttttatttcctgaataacatctttaggactttccgcactaacaaatgtagccctttttcttatctgacctctagttatcgagttatagccctttgaagttgattttttcgatttttcaaacgttcatatctttttctttctggatgattgaaacacgttcaataggtcattggatttggaattgtttgaagtttatttagtaatttacttgggatcattggagctttcctccgtccttgaaaggaatttttagttttttgactttttgtccatttttgaccactttcaactgactctggctccttcaaatacccctggaggtatacttttgaaaaattctgtgtgtaggccgtattactctcttcccaatgacaccatttttagtttttcaagtaagggtaaagttcattaaatatccatttttcagtgatttttgaacgttttttttagaaatttttcaagctagcttttttgttactttttgttaacaacttttaatgttcagaaactcattttgtagatgtgtttttaaattataaactgatgtaaagtatgattcgaaatgttttttcaaaaaaatgttatcattaaatgtgtgcaaattttgctcttttttttggcaaaaaatattaaaacggtgataacttttttttgaggaaaaattggagatgggatatttgatattttgtagataaattttttctctttcatatggtactattcacgcccaatttaaaagagattgaaaagcgtagttccttaaattaacgctgattttaacgcttttcaaatagttatagtgatagttgattacgtaaacgcgtatctaaaattcatgtaaccattttttcatgttacaaatttatttcagtgtctacagaattaatggattctttacggtttacatactcaaaggtttactattgtggtgacatttgttattattagcttgttatcaaaaataaaatatgtagtagtaagtaggggtcaaaatttcctgtagggaaattgaaattaccaaacccaacgctttaagcgtcagtttcccctttaggggaaatgacaaaagagtcgattaggttcgtcacgcggaaactagttaatattatatataaagagaatctgaataaattaattatgtttatcttcaggatcaattctaaagactttatcagggttgagtaataataaaggatcaagtgcaaactttatctttctcattaaatcaataggtgtatcacctaattcttctaaaagaaaatctcttttaccaataccgataccgtgctcaccagtaacagtaccatctaattctaaagctttatgaaccatttgttcaacaactttttgaactttttcacgatcttcctttggataaacaataaaagtatggtaattaccatcacctgcatgagatacaatacttgcagttaatttagcatcatcaataactttacgtgcatgttcaagactgtaaactaattttgatattggaactgcaacatcagttgtccaaatttgagtatcagggccatgtaatagtttacccgcatccagtgttgaccaaagagcaactttacgagcagtccataattcttccttttcctcatctgatgaagcaaatctaaaattagatttaccacaattacattcataacaaatagctttaatatcattagttatttccttaacaacattagttgaattaccacctaatttgaacattaaagttggcaattctttatatttattagtaacactaccagaatcattaacgaatttcatcatttcagcatccaataattccattgcattaaattgtaaacccgactgaaccacttttgcaactgcttttgctgcatcatcaagggttgggaaacttacaacggcaacattttcaaatttaggtaaaatatttaatttcaaagttgcttcagtgacaatacctaaagtaccttcactaccaataaataagtttgttaaattataaccagcagaagatttctttggtcttctttttgttttaacaattgaaccatcagccataacaactgttaatgagataacattttctctcattgtaccatatcttgcagcatttgtacctgaacaggaagtaccacacataccaccaatacaagcaccaggacctggatcaggaccgaaaattaaaccttcaggagctaaatattcagctaaatcttcccaaccaacagctggttgaactacaatatctaaatcttccttatgtaatgctataactttattcattcttgataaatcaatacaaattccttgacgtgttggaatataatgaccttcaagggaagtaccaccagtgtaagggacaattggaacatgatatttatgagctgctttcattataagtgaaacttgaacagttgattccggatataggacagcgtatggacgttcatcatcttttggatgatcagttgaaaagaaactatctgaatgattttgcagttcatcctttgaaactgaaatttgatccgatttaaggtaagcttttaaatcatcaagtactttttgataatcaccataaataggtggtaaagttttatcaagaggtaaagttgaagtgtgtgggaagataaattcaggtggatctttacaaatattaaaagaagcccaagaagtacctgctaagacaccaattgttaaaattgcagctgaatataataaatttgagcctctgctagaggaggacttatcagaagttgctgcagaagttttgattgattgtttagcatcattcttaccaacattttgccagaatttggaagtagagaaagctctacgagcaacacgatgcattgggtcaggagaggatcaaagtgcttggagcggttgaaacatgcacatgatgtggacatagctgagtctttatataaatgatggtgggataatatatatcgtaggaattgaattaccgggagtttacgtaatacttaggtagttattaatgggatggatgtattatcataattattataattattatagaaagattactacataaagtcatcatcggagagaccatcatcatctggcatgaagtcatccatgttatcctttttgaaagatgcaggacctgtattaaccagtgcagttttagctttttttttaccagcaccacctaaagctgtaccaccagtttttttaagtctattattacgttcatctttaattttcttagtaaccattgcattaagagttgaaataacttttctaatttgttcaacagttaatggttcacaaacatctctagctagatcgattgcaagtgaatttgcatagaaaagtgatgatttttcacttatttcatgaagtgttgaacctaaagttttccttaatttttcaaaatctgccttattatttggagcgaatagaggatgagcagctaatggtgtatcaactgttaatttaagtgctccaccaccatttaattgattattattagcattagctctagctcttggatgatctgcaactcctaaaccatcaaataaatctgctgcattatttaaatctgcatcaatttcttgctttctaagcatttctttacgtgttttttcatctactagatcaatttctaataatgttttcgatcctttattcttctttgcatcaagttttgccttttgagctgcctttaatgcagctaattcttctttcttctttttctccttctctctttcctcatctgaatctatatcccaagattcaagaactgcttcatcatcttctacaccatcttcccaagaagcggatgcaggtgcggcagaggagccaatatcgaaatcttcatcatcccaagacatattgttaatagttgtttatagtattgttattctaagaaaacaaagtaaaattaatgaagttgacgttaaagttagttatatagttgaaaatggcaaaaaaatttaaaatctgcaaaattcgagaatttactatgagaaaggctctttacttagtgattgtctctgtttgccctcatagttatctatcttttatcttaatcactatacaaacaatgcaatttataccacaatcatcacaaccaaacacagtatcctctctctcagctgctcaagctgctccatctgctccaggattaccagatgctttccgtgcaggtggtccactttctttaacttcaacagttaatggacgtcatccacttgaatcaagaattaaagaatgggatgcaactcaaatgcaattacaaacagagatacgtagacgtatgcatggtttagcagatccattaaagagggaaatggatttagcaatggtttcaaaatcaagtgtaagaccaggattaaataactcaaatgttcatttggatattctcaataataaagattactcaattgattgggaagatatatatagtgatagtaataaattcgataccatacatactacaatggaatctcaaggtcgtatataagaataatactatataataatcatgtgtaatcgtatataaataacttttattaagagaaaccctcgacatgaaaacttttcagtgatcactgcaattacctgatttacactatagtataacattcaacaacctacatctttaactgatttctttatctgataaccctctatacacactcttactaccttatcaatccatataattaactatgtcttccaccaattctaactctaatgatatcacatattctccggccgaaattttggccatttataataatttaaaattaaataataatattaaaattgacccaaatgcagctaactcaaactcttcaagagcttcatctttaaaagatccagtttcaatggatttgttttcaaaagaggaaatacaatctgctcaagagaaaattaaattaaaacaacaaagagaaccaaatgagagtcctggaattgggaaagatctaccactttcttcatcaatgacaacatcaacatctacttcaacaattggtaattctacttttacaacacctgaatcaactaaatggttttatatggatatgaactcaattcaacaaggtccatttgattcttcattaatgcaacaatggtatttacaaaatttattatctcattcattaactgttagaagagatattgatactaattggattacaatttcagatttatggaaaaaatgtaatgctttaccaaattataatattcaaaatgctccatttaatcaatcattacctaaaatactaatttctaatcctaataataacattcctaaattagcttcttttaattcatcttcaagtatgtttgcaaatcaatttttcaacaataataataataactcatctgcaattaattcaactaatccaacaactactaattcacctgatcctaatattgctcatatgtcaacaattgctaataatggttcttctgttacaactccaattgattcagcaactcctttaaattcaagatctaattcaagttataataatttattaatgaatccaatgatgaatttgagtggggtcaattctatgaataatatgaataatatgaataatatgaatagtatgagtaatatgagtaatatgagtaatatgaatttaaataatttgaatggtttaaataacatgaattcttttgataattcattgaatatgaatttgaataatatgtttatgaatgatattaattcaatgtcgggtataaataatatgaatgtcaataattcattgaatatgaatatggatatgaataatttaaatatgaatatgaatatgaatatgggaatgatgaataatttaaatatgttagatcaaatgtcaaatatgtctaatttttcaacattaacaaatatgtcaaatcttaattatggtttagattcaatgatggatccattactaatgaataattcattaaataatagtatgaatcattcaatgaatacagtaatgaatggttcaattaatgctacaatcgatccaattaataattcattgaataatacttcagataatgcagccaattcttttaattcttttagtaatatcattgatgggttagataaatctaatacattgggtaatgaacaaccaattccatctaatgaaaaaactttaaaagttaatgaagaaatcaaacaagaagttaagcaacaaatcaagaaacctgaatcagtttataaagttaaggaaaccattcctgaaccagttaaaacagcagaaccaaaaccagccccagctccagtttcagaaccagttaagacatcagtaccaccacctgtttcaaaaccaacccctgttacaaaaaaacaagattcaattcctgaagctgtcagagaatctttgaaacatgcattttctctggaagaacatatgaacgaattgaaaatcgatactaaaaagaaacaagatcaaattaatagagaaaatgctgccgctgcattagcagctgctgaagctgccgcagctcaagaacaatctgatgaagaagatgatgatgtttcagataaagaagaaatttcagctccaattattgaagaaaagaaagaacctgtaaagcaaacttctaaaccaattaaatccgttgttgcaccatgggcatcagtttctaaaaatgttaaaccttctaaaacatttgagcaaattcaacaagaggagaaaatgaaaaagcaacgtgaacttgaacaacgtcgtaaaatggaggaagctgatagattattagcttcaaaacttgcatttgaagaatcaattattccaacaattaatgttaacaataaaaagaaaattgtttcaattgctgaattaacttcatcaaattcagcaaataatttaccaactaattcaacatgggctgttaataataataatttaacatcaattccaattaaatcatttgatgaaattaagaaagaagaattagaaaatgcacgtatgaatgaacaattacaacaagctgaaagaaatcaaagaacaattgcagaggcaattgcaaataaacagaaaacttctaattcatcaatttctaatgaaaatcaatcatctaatgcaactaattcttggactgttgtatctaagaaagatgcaaaacctaaagtatcaactcctgtaacatctacaattccaatgacaacacccgttgttaaaactacacaagttagatatagtgcaccatcagtaccaagtatttcatcaacatctaaaaactatccaccaatggcaattgaattcttaacatggtgtagaagtcaattatcaggtctttatccaacagttaataaagaagatgttttacaaattatgatgcaattaccatcaggttctgaaagtaatgaaattattgcagatacaatttattcaaattctagtacaatggatggtcgtagattttcaacagaatttatgaaaaagcgtaatcgtattgaagatacaattaaacgtcgtgaatgggcatttgattggtttgatgcaattgaaggtacaaaaaatttaccaattaataattcaacaacttcatcatcatcaaatacagaaaatgatgattgggatagtgcattcacagttgttcgtaagaaaggtagaaagggaaattagaaaatatagaattatatagagttatatagaattatttatttatttatttatttatttatttatttatttatttatttatttatttatttatttatttatttatttatttatttctttacaatattaatctttatagaatcaatacgagcttttatatcatccattacattttcaacacctttataagtaaggttttccataattttctttctttcattaattgaattaattctacgtcttaaagcttgattcatcataacttcttgagcaattgggaaaactgttctactccaaccttgtttataattttctgcttccttggcaatttccatcatttcagcatcttgtaatttaacttgcatttgatatcttttaaaactatcatcaccaattaaaccttttgtatataaaatcataattgaaggttcagtttcctttaatttaataattctacgcattgattcagctgcacgttgaactaatgaagttttcatcattttttcatgagcatttaattcctttaaatctgaataaattaatgcaggtattgaatcaattgttggtgtatcaatatttgcagataatacatcctctgccttaatttcatattctggattgaaaagtgatgatgatgttaatttttgtaattgatgaactttagtacgacgatgatatattgaaaatgtaattaatgtaaatattaaaacacctaaataaagtaatggtgttgcaagtgatatagattttgttatattttcagtagttgtttcattacctgttgcattagctgttgctgttgcatattctgtaaatgtttcaaatgtttcagttgcactttcagcaaatgatgcagtactttcacttgacattattgtatgtactagataatataaaaagaacctatctatacttttaataagaacacgtcgatcaatgaaacaatgcctaaattcatgcacacagtgaaaagttggtcagattaaatttatacaaaacacattacataagcagaatttatttacgtttcttttcataattatctctaactgcttcaaggtattcacccttcttggtaacatccatatctctacctaatagtttaaatctaccattattggctaatttctcacgtattatagtatctgagatcatatcattaccaatatctgacatatcacttaattttaaacgatatttaacattcatatttaaactaccaaaattgcaaaataaccaatataatttacttgttggaataactgtctcagttacaccaattggtgatactttaactgacattacctttaatccataatctgcatttttgaccattttacaaaatgctccaacatcaaatccttttggatatgataaaagtcctttaccattagtaattgtaccttcaacaattacatataatgtactattatcaccaactaatttttgtaaatcctttgaagcatcaatatctgatgatgatgcatcaatatctacaatattaattaaatttgaatcatttacacttggtgttaattcatatgaaccattaaaacaccaattaacccattgaaaccaatgattcataacaacaattcctgaacttgttgcaataccaactttaactttcttagagttttcagatactaatttccaaataaaccaatctaatggacctgtagcattaactaatataacatctttacaatgtggagattttttcaatttattagtttcatctgattttttaataccttcaacaataagttcagtttcagaaacattgaaaaaataagctaatacgacatcagttataatcttagcacctgatgaaaatgtattcaaaattggtacgaataatattaaagttggaatgaaaattaataatttaacaattataataattgaatggaaaaataatgttggaatagttggttttaatgaaactggaataaatggatttatcccagtagttttatctgaatatattgagaacttctccatggtatatttggttaataaaaagagagtaaaatacgtgaattataaagttttgaagtgttgaaataatttcaggtatcgatggtaaatagactgtgcggatttatactttgtccattaagaaaaggtatagacgtaggttgttgaggttattagaatatatcaccatagtttgtttttatataattacatatagaggattgtttataagatgtaaaaagtatatgtttacgtttttggtattaatgaagcataaatagatgtaaagaagaaaataagaatttaattttgtggccatggaattgcaactctttctcttattcctggataatatctaaccatttgttcccaaacttgcagtctttgaatactagcatcactagcagtacctgcattagttctagtaaaagcatcaggatcaacagataatccaatcataaaagtaacacaaccaacatctaatacattaattgttgaactaacaataaaccaacaaataatcatactaccaataccacctaaaattaacatttcaggtcccatttcatttaataaagttgaaaaattaattgttaattgtaatacaacagcagtaattattattgataagattgaatataaactaattgctgtactaattaatgaatcattaattaaaatatcaatacctttatattttaaaatttcaaaagtatctttggcactttcataatatggtttaccatacattgaaagatatgaataagcatatctattaaaccattgtaaccaatattcaaattcatttgcaatccattccagtattgaaacaatacaaattaagaaacaaaataataaacctgaatcatccatttgattatctctatctctttgaaatctagcattttgcatctttgattttaatacttgtaaagaaattctaattgtttgaataattgatacaattaatgaaccaaaacatatactaccaaaacaataagtaaaagctcttttcattgaacctaaagctggagattttggtttaactgttgaatcataagtatcaaagaaataccaagaactgaaaatacctgataatataacatgaacggtattttgtaaaacttggaaaatataacaacctgagaaaattgcaaataaaataacaaatgatgaagtatttgataagcaaatatcattaccattcgtatgaggacaattcatatcatcatttgtaattcttgcattgacaattataatcaatgaaaccatataaacaagtgaaattatgcaagttattaatgatgataaaatagaaatgaatatagttgaagggtatttattcattgcattaacgactaattttatcatcaaagcagagaatgagaaacgattaaaattttgaaacatgaataataatgaaaagatacccaatgcaccaaacattaaagaggggaaaattgcaccttgagttatcatagtaccagcaattgagaacattgataatggaaccaataaaaatccaattatcaaaaagaccattggaaaacaatatactaatataagtaatgatacagatatcaatacaggagtaattgttgaaactaatattaaagtgtataatgcctttgtacccttagataaaccatcggtatttaatgaaaaacttattatatcactagatgatgatttatatgaattataagttaagaatgctaatcctaacaatgttgcaatgaaagtataagtgaatgaaacatcattatatttcggagtttcaatggggaaggcgtcctcatatgcaggggcgggagttggcttttcaggtatttcaaatgagtatttatattcttcattttcatctatattatcagaccaattgacatatgcgccattagtaggttccgcatatggcggtggtggagcaacagacattttgtagtaataaaagaagacacatcaaagaagcaaacagaaagaagaagaaagaagattaattaaatttattattaaaaaggtcatgctgtggattataataattataagattacgtaaagtctttatgatgtcattaagtgtggatcatcatactataaataccccaggtttttccacttttttagtgatttattaaagacacttcttttctttcttttggcaatacaactacaatgtctaatcaatcttatattactcttaataacggtgttaaaatccctcaagtcggctttggctgctggaaagtcaataacgatactgccgctgaacaaatttatgaagcaattaaagttggttatagattattcgatggtgcaatggattatggtaatgaaaaggaaattggtcaaggtattaaaaaggcaattgatgatggtttagttaaaagagatgaattagttattgtctcaaaattatggaatagtttccattctcctgaaaatgttgaattagcaattaataaagttttatcagatttaaaacttgattatttagatgttttctatattcatttcccaattgcacaaaaatttgtaccaattgaagaaaaatatccacctaatttttattgtggtccaaatggttgggaatttgaagatgtaccattagctgaaacttggaaagcaatggaaaaattagttaatgatggtaaagttaaatcaattggtatttcaaattataatggcgcattaattcaagatttattaagaggttgtaaaattaagccacaattattacaaattgaacatcatccatatttagttcaaccaagattaattaaatatgctcaagataatgatattcaagttactgcttattcatcatttggtcctcaatcttttattgaattgaatcatccaaaagttaaagatgttgtttcattatttaaacatgatttaattaatgaaattgctaaaaaacataatgtttcagttggtaaggttttattaagatggtcaactcaaagaggtattttaattattccaaaatcaaataaaaaggaaagattattagaaaatttcaatgttaatgattttgatttatcaaatgaagaacttgaacaaatttctagtttagatattaatttaagatttaatgatccttggacttggggcccagaaatcccaattttcatctaataataaaagtattttatatagttatagttatatagttatatagtctttataaagctgaaactttaggattttttgaaacatcatcataaatatcaaatcttctttgaattgaaattggaatattttttctagcttcaacaatttcatctttctttaattctgcataagcaatatcttcctcatgacctaattcaactaaaatattaccatttggatcaacaaccatactatgaccataagattgataaccaccatttggatttctagcaggtgaacacattaaaacataattttgattatcaattgctctagcaactgaaaattttgtccaaaattttggacctgtaactgtattaaatgcaccaggatatgccattataccagcacctcttcttgatgcaattgtagctaattctgggaatctaatatcataacaaattcctaaaccgaaaattgtatcaatttgaggaatttcgaaaactgtggctttattaccaggttttaaagaatcagattctttaaaagttataccaccaggtattgaaatatcaaataaatgaactttcctatgtttagcaacaatttcaccatttggatcgaaaacaactgatgtattatataaactaccatcagtttcatccaattcaggaattgaaccaccaataatggaaacattgttttctttagctaattttgataataattgagttgtttcaccatcaggtattttctctgcataatttttaaattgatcaactgcatatggtgattggaaacattcaggtaatactaatagttgtggtttaggtgtatgatttaatgcttttttaataaattcagtaactttttgtaaatttgctgatttatctgcacctgcatgaaattgtaaaagtgcaacttgtaaagattttgagagtgtaactgctgacattaaatgaagagtttattgatcaaaagaaagggaatgaaataatagtttaaaaaacaaacaagtgttatcgataaaaatgactaatcagttaaatcaccgctataaaaataatattctcaatttcaaccacagtttatcatcgttacagttatcatgaagttgtttgtatgtgtggtatattagatagtttgattccttatatagtgactatactactcaattgaataagacgtagtttattagctaaatattttgtattaatactatactatatatagtaaataaaagaaaaaagatcaacttaagagggctcaactgacaacacgtgactcccattggacgatgcacaaaaatatattcaattatgttgtttctttcttcaatcaataacacaatcattggtatagcaatttaataacaatctccaatgagttatcaacaacagcaaccacctccacaatactatcaacaacaaataccgcaacaatactatcaacaacaaccacaacaattttatcagcctcaacaacaacctcaaccagtttatgtgcagcaacctgctcaacagactaataataatgaagactgtatgatggcatgttgtgcttcattgtgtatgtgtttaactgttaatttactactaaatgcatgtttgatgtaatgataataaaacttgtacattttctaccattgatgtatataattagtgtttacgatgattaaagccaaatttccaatatactactatactaatatccgtatctataatatatatctaatctacaatgtatagctcttaatcaatcaataaatctctttcatgaacatcaaggaaaatgcaattatataaagacaatcggtaaattcttctaaatcaaattatctccggacattccacggatttaaaaaagatttcggttcatgtttccactgattagatctccttttcatttcaactgttttcttttacaacttcttctctttcttttactttcctttttctgtataaacaaccaattcacatgtttaatatatcacataaattaacttcaaaactaccgtttcaaattcgatatattcaacaatgtccacctcctaaatacgatactggttgtacttattgtaatccgccgagtgaaatggaagaaaatttgaaatctccacctgaatcaatccgaaatactattccaccattaaatagattaattttccatagatcaggtaataaagatcatgataattggcccaaaaaagttgaagtgtttgatattatgcgtaatatttctaaatttggtagaggtaatggtaatatgatttgtatgtcttcattaagtccaataaatgaaatgacaaccaatgatcaacagaatgttgattttgcaatttatccagatgctcaaactatttctattaatggtaatgattccacagaacttgaaaaattattcaaaataattaattcaaatgattcaaataattcaatttcattatctaaacattttagagcttcaaaaattgataaaactatagtacttatatgtggtcatactcaacgtgatataagatgtggtgttttaggtaaaattatacataaagagtttgaagaagtattgaaacgtgaaaatttggaaaatgatgttgaattgggttatataagtcatgttggtggtcatgtttatgcaggtaatttggtaattttgaaacctaatggtaaaatgttttggtatggtatggttagacctcatcatgttcaaggattggttgatcaatcaattaaatcgtccgatttgattgaagaattatctagacaataaactatatcaatatttctgaaaaaaaaaaggtttatttcttatcttacttacagtttataaaatataaatacattcataaatacaaatttgaattaatttaatttatcttaattatttatttgcactggttcttgcacctgcacctgaacgaattaagtctaatgattcttgtgaaactttaacttttggtaatgcaaaagatccagtattatcaggttttggtaaaaatccaatttcaattaaatatgaaacatagacggataaaacttccttagtaacacccctacctgatgaataatcaacaccattagaattccattctttatcaattgttaaaacttcaactgcgttagtatcatctaattctggtgccttagtttcctctggtaaatcacctaaaacaaaatgtaataatgggaataatgcactatctttaccatcatcaataatatatttctctaatgatttacaccaatctctataatcagctctttcaacattatatccaaattcatttaatgaatttaacatttcattaaatttaattcttggatgaccagtaacttgaacaactgataaattttccttagttttaacaggtggatgaagtgcagatgcaacaacaactcttgcaacatgatcaactggtacagtattaacactattagtaatttcaggatatgaaccaacttcaacacatccctttaacattcttaataagaaatcatctgtattagcagaacctgtctcactaaaaccttgaacataacctggtctaataattgcacctcttaaacctaattcacctgcacgtctaattatatattcagctgcccatttactttgtccatatccaccacctaatccagatttagctgctaataaatcatctgattctggaatacctcctttatcaagttcatttgaatgtaaattagcacctaatgtaacataatgtggtacatcaacagttgaagttgatgaaacaaatgaaaaattctttgccttaccttcggcacacatatttaatacattgattgttgcaataacatttgcatctcttaatttatcatatggataaacccagtgaactaatgcaccattatgaataataacatcaattgtatttgttaattctgaccatttagaatcatcaagtccaaattgttttgatgatagatcacccaaaacaacattaactttggaatcaaatttttcattatagacaccataaactttacttgccttaactaatctttctaagcctgatttttcatcctttgctctaacatgtgcaaaaatttgaacgtctaatttagaacgtgataataattctctgataatgaaagtaccaaggaaaccagttgcaccggtaacaaaaacattaacagttttagctgtatcaattgattccaaagttgcatatgttgattttaattcttctttggataatttaactgcatcttcataataatcaatctttgcagcagttgattctgcagcttcttcaatttcattaatatctttaccatcttctaattgtgataaacgttcaacttctttagcaaaagcttgaacagttgggtgtttgaaaatagtacctaatggaacttcaattgataatttctttcttaattcaaaaatcattcttgttgctaaaatagaatgaccacctaaatcaaagaatgaatcatcaacttgaattgatgatggtctatttggtaatactgaaatccataattctttaatcttcttttccatttcagtaaattcaacatctgatgaatcattagttaatgatgaatattctgcaactttattgatttgttcctctgatggtaattgtaattttggtttatcaaccttaccatttggatttaatggtaatttggtcattggaataattaatgttggaattgaatatgatgctaaacgtttctttaaatgtaattttaaatctttaattaagttactaaattgaactaaacccttaacaataggatcggtaattttttctacttcatcagagataattttgaaattatttaattcttcaacaatttttggaactaagaaagtaactaataatggttcattatttttatcttttctaactaatgtgatattttctctaatgagtggatgttgagaaatatgtgtatcaatttcacctaattcaattctaaaaccacggattttaacttgatcatctgcacgaccacaacattcacaattaccatcaggtaaataacgacctaaatcaccagttctatataatctatctcttggtagtttccagaattctctccaaggttcgcccttatctaattctttatcctttgcaataaattcatcaattggaacataccaattgttgacaaatttttctttgtttaaatcatcattcattctataaccttcggctaaacctgcagctctaacataaatttcaccaacttcaccgataccacaagtttgagttctatcatttctattaacaactaataattgaacattttgcatacctgtacctgctggcatgatatctttttgagtttctaaaaatcttggatctttatttctacttggaatttcaaaatatgaaacagctctttgagtttcagttgtaccatacatattaacaatattacaattttcagccaaagtttgtaaacgtaaacaatctctctttgttaaaatatcaccaacgaaaaatgcatgatgtaatgatttaatttctgcaattgcttgagcacttaataattgacccattgcaggtgttaaatgtgtgacagttgcaccatgtttacccatccattcagctaatttaccaggagtaccaatatcatcttgagttggaactaataaagttgcaccaaggaataatggtgtgaacatatctctttgaattggatcatgtgcgatacctgataacattgtaaatttatcattttcattaagattaaatgtttttgacatccaagggaaataataagcaagtgaaaaatgtctacctaagacaccttttggtaaaccttcagaacctgaagtaaatgaaagtgttggattagaatctggaccaacaataacaccagttctttgagttttatattgttcatattcagatagaatatctttaccgttaatattaccaccaattaatgaaccatcatcttgaatttcaatttctggaattctagttataacatttaattcattcttgatgtaatcttcaacaaaatcatcaataacacctgctttcttaataccaataataccttgggggttagcaacttttaaataaacagtttgtctagcaggtggataagcaggatcaataacagagaaagttgcaccagcctttaaaacacccataactgaaaccattaaatcaacacctctataagcataaatcataacgatatcaccccttttaatacctgttttaacaagataattaccaacaatattggatgcttgatcaatttgtttataagtgaaatgtctatctttatcgttttcattaaggaatgaagcagtttcaatgacacaagttctttcagggaatttatcagcattatctgaaaagatatcttgaattgcacctctaaaattagaccaatctaagtcaatagttggatctggtaaaactgatttttgagatgaagtgattaaactaattttagaaatgattaaagatgaatcatttgaaacttcttcaataactttaataaattgttcagataagaactggattcttgatgatttataaagtaatgaattatagtaaactgataattctttatttgatttattgaaatagaatgaaatatctctaattgagccattaacggttatatctaaggagtcagaatttgttgaatattggaaagatgatttatacaaagcaggtggtttttctaaggatttagaggattgtaaagcatcaacaatagtttcaataggaatatgttttgaatataattcttcataagttgatttaacattatcatataattgtttaaaagattttgaaggatcaactgataatttaaagatgaattcatttacacctaattcattattggtactaatagtaatttcatcatcaccagtaagtctatacgttaataatacataaactgataaagctgtgaaaaaatctgaattttcaggtaattgaaatttaaaagtattttgaatgacactaccatcagtaggcctttgaaaatcaaagggtaagatatttaaagttggagaatccaatgtttgggtccaaaagtccagatctaacatgtttgtaaaactaaaagaaggggaaaaaggtaaaaagaaactaaacgtaaaatctaaattgaaagtctcccaactgaaaaatcatgtcaatgtcaatcgttgccaatagacttgttatgattctccataataaaattaaatgactcagaccgcattacctaatatggtaattcaaattttttaaccgctgaagatcggaattttcaaaaaatttttgtaaaaaacttacgtaattaaaaataaatagacgcgtctgtattacgtaatatgttttaaaaagataataacaacttacccgccttctttgcttactgccagtaaaccattatattggacattacatgaatttaacctttaaagattcagtatagagaattagatttctataaagaagggagttttatcttcaataaataaacaatgtctcagaggaagttattacagtatgtataatcagtctttttcagtttgtataccattatatgatcaattactaacattttattatcattatgatattattatctattatagggaaattgatcgtgtattcaagaaagttaaggaaggtttagaagtctttgactttatctatactaaacttcaagatactgataatcaatctcaaaaggaaaaatttgaatctgatttaaagaaagaaattaagagattacaacgtttcagggaacaaataaaaaattggatgagtggtacagaagttaaagataagaaaccattaattgaacatagaaaattaattgaacgtgaaatggaaagatttaaagaagttgaaaaaatgatgaaaacaaaagcattttcaaatgaagcattagcttcaacgaatgaaataattgatccaaggatgaaagaaaaaatggaaactgctgaatttattcaaaataatattgaagaattgcagagacaaatggagagtgtagaagctgaaattgataatataatgtcaactttgaaaaagaaaaaatctgattctgctaaacaatcacaaattttacagctacaaaaaattttagagagacatcaatggcatataacaatgttagaatcaattttaagacatttagagaatgataatttagatgttgatcaaattaatgatataagagatgatatcgaatattatgttgaatcaaatcaagatccaaattttatagaagatgatacattttatgatgttttaggattagatgatattgaagatagttttgcagtaatacctgttgatgattcagatataacaagcaggtctcattctgtaaatgatgctatgattaatgatgctatgaaagataaagaaaaagaaaaagaaaaagagaaggaaagattggagaaagaaaaggaaagagaaagagagagattagagaaagagaaattaaagaaagagaaagagaaggaaaaagagaaggaaaaactcaaaagttcgattgatactgaatctgcaaaaccttcagcttctaatgttttacttaatggtaatttaaaggttgcaactccaattggaacgcccaaattaaaatatgctagtgctgttttatcaggtataaagaaatcaaatccttcaactccaagtaatgtaccaatacaattaagctcaacgcctttacaagcaagtgttcaaactccaacaccaatttcttatgcaacattagcatcagctgtgcaatcagcgcataaatctcaagcacaggcacaggcacaagcacaagcaaattcacaaacacacactccacaacctacatctaaaggactatcaccatctacagtcaataaaacaacagtaacaaccacaacaaccacaacaacaacaacagtaacaacaacaacacaaaatccaagtacaaatagtggaaataaagaatcttatgattcaaatactggtataacatcatcaacattatcatctactactaattcatcagtagaaaacaatcagttatcacaaattgatttaaataatattgaaagtatagcatcattccgttcaaagaaaattttaaataataattcattcaagcttccacatataaatggtatagaggaaagtttatcatttttaaattctgataattataataatttaccaagtggaattgattcatatttaaaatcattagaagttgctaaggatagaatatttaagtttaagaaacctgatgaattacatgtaccatcaaagaaatcacagccacctccaatgatttgtgaatttaaattaccaaaacttgaagatatctcaatatttttagaaaattcattattaaattgtcctgattcatttgattctgataaacctcataattatattccatgtaatccatatgttacacaaccaagttttccaattgatccattacctgaaattgttggatcaacaaaattattgaaaaatgttagtttagatacattattttatggattttattataataatttaagatcaccatcaatgttaacaagtttccataatttaaaacataatgatgatgatgattatttacaaattataatagcaaaagaattacatcgtcgtggatggaattataaggcaagtacacatacatggtttacaaaggataatgatgatggattatcaaatggtgattcatcaataacacattggaaaacttttgattataaggatacatggatggttagaagaaatccaaatttccaaatagatgtatctgatatcgaaacaggatactactaagtgtttgtatatcattaatgtaatgtatattgtatagaataatagaataattattaactataatttaagtgtaataatcggtacttcttaaataggaaaccttaggaaccatcccccggccgaaaactaagaaattattatgtcagaaaaaaagctggattttctattataacggagattgctttttatgtcaaaataactctattagttaatttagtcgttaattatcaaccatcagcttatcacaatttgtaacatttacaatattgaaaaatggaaaattgggttacttttcctaaattatttcaatttatatcatttgggatgttcccctccacatttgttaatttagtttccactcttttctttctccctcttgcttcattctcttaaagttttagtattttgtttaacatcaacaaatatgagttatcaagataacaataattctgattacgaaaaaattaatgatcaattagagagatcaggtcaacctgttcaattcaatgcttcaaagaagagtttcttcaatgttaagaagttaattgttatggtattcttagcaattacaattggttcagttttccacttcaattcatcatcttcttcttcttcaattggtggttgttcaggtaaaaaaaatgttacaggtaaatttatgacaccattcccatttgatgaatcaaaacctatttgtccaattccttcaaaagttgcaatcaaggaaaaagatcaagttcaatttattttacatgatgaaaaatatcatgaaggtgttattgaaagattttcaaaatctttacaaattgatacagttgtttatgataaaactacagattattcaaaaatggctaaatttcatgaatttttagaaggtgcatatccattaatttataaaactgctgaagttttcaaagttaattcttatggtttagttttccatttcccaggttcaaatgctgatttaaaacctgttatgattgcagctcatatggatacagttccaattggtgatccacatgattggaatgaagatccttttagtggtagatttgatggtgataaattccatggtagaggtgcaagtgattgtaaaaatttattaattggtattatggaagcaactgaaaaattaattcaagatggtaaggataattttgaaagaggtgttattcttgcatttggatttgatgaagaaaaatcaggttttgatggtgcattccatattggtgaattccttgttaataaatttggtgaaaattcagttgaagttataactgatgaaggtccagttatgtttattgatacattaggtgattattattcaatgattgttaatggtgaaaaaggttatgcagatattgaagttgaaattacaactcctggtggtcattcatcaaatccaagagatcatacatcaattggtatgatttctaaatttttaactgattatgaagatgatttatataaaccagttttatcagatgatagtccaatggttggattttttgaatgtttaggtgaacatggacgtttaccaactgatttaaaaaatgctgcaagacgtgttagatatgatgaagatgctagagattatgtccttgattatactaataacttaccagttattaaatatagtattagaactgcacaagcaattgatattgttaatggtggtgataaggcaaatgcattaccaagattagttaatgcagttattaatcatagaattgcatatggtaatgatttagatacaatttgggaaaaattaacaaaacacggtaaagtttcagctgataagtatgatattggattaacagttaatggtaaagaaatttatccagaaaatgaaaatggtaatatgattattagatattatgcagatccattagttgatgcaccagtttcatcaagtgaagatgatttttataaggaatttacaggtataattaaatcattttatgaagatgaagttttcccagaaaaattcaataaagattctgataaaaaattcattattacaccaagtattatgagtggtaatactgatacaagacattattggaaattaactgatcgtatttatcgtgttcaaccaggctcacttaatatttttgatgcaaatattcatggaccaaatgaatggactgatttaacaactcatatgcaaactgtttcattctattacaattatatttcacattattgtcttccagatgaagaatgattaagatattagttcattaaacatgatatgactatatttcaaaaacttttatttctaaacacacaaacaaaaagacaaaaaaacaacattttaattttttagtttacattattttacttccagtatgtgttacattatcttttattttctcttatttatttctatcaacattttgataatgtttttgttcatttttattattgaagatataaaatctttataattttttaaaagtgaaaaatacttagtattaaaaataaataattataaaacaaatacaaataagatagtaactcgagtcaatcgaattagcttaaataactagtattccagagattagttatactttgagtattcagggttccaatatttacgtaaacttggtttatattcagcacctgcctttgtaattgcatcaacatcagcagctgataaattccagttatcaaagatacccttaaattcttcaaatctttcaagtttagaagtagtagtaattggaacaatacctctttcaataacccatttaagtaagatttgagttctagttttcttatatttagaagctaattcatcaattaattcaataaattttaaacctgcaccattagttaaatcaccactaattaaaggagctaatggagaataagcttcaacagtaatatttttagatttacaataatcaacaattccaggggtttgattttgtaagaaagcattaaattcaatttgattaacttgaggatttgatttagttgtatcccaaatttcttcgatatcatcaacggcaaaattagagacaccaatttgtttaactaaaccttcatctaaagcttgttgcatatatttccaagcttcctttaaatcagaaccgtgagattctttcttaatgaaaggagcatgtaataaatataaatcagtataaggagtatttaaatatttattgaaagctttaattctttcataaggatttgaaaaagttgaatgagtagtataggtaccatcaccagcataatatttatcagtaatgaaaatatcttcacgtttaagatcagtggttgataagatggtatctaaagtttcctttaattcagcatcatttttataacattcagcagaatctaaatgaatgaaaccttcctttaatgcggttgaaaagatcttaactaacagaggattagctggttgatctgcagttgctttatagtaataggtacctgaaccgatacctaataaagggataccggagttgtttttaggtaatgtaaaagccattgagttgattgtagttgatttggggaaaagaaaaagataaagatagatcaagtttaaaagaaaaggtgattagtaattgtatttatatttctacagtcccaaatccattttcagtaatgttgatatattgatctttctagaagcatcgaatggaaatttattgggacaatactccatttgttaatctacttcatccatattttataatagtactttgtaaagtaatagatgaatctatcgctccgacggtcggtctaatggcattctcaggtaagaaggtattgtataagctacaagctgaattgtggtctatattcgaaagaaacattagaaagagtgcattttccctatttctttactttataatacgatttttacatagtatctgtaattaaatcgcctactcctgtaaacatagtctaacctacttccaatcacttgatataaacaccttaatcaaggtggtaatataaagattaatataagaaaaggcggcttaaacaatttgcacattctaaatttttttaatgacgttgctttcttaatattacaatgggaaaggattaaggtgtatttctataaaagatgatttgtatttcttttcttttctttttcttttgcttttagcttattatctatacaatggcaaacgttctggtggtatctaatagaattccagttactatttctgaagagaatggtgaaagtaatgataataataatgagagtaataaatatagttataaaatgtcatccggtggattggtcacggccctgcaaggtttgaaaacttcatttcaatggtttggttggccaggtctgaatataactgctgatgaagataggaaaagtattgaaaatgatcttaaatcaaaatttaattgttatccagtttggctttctgaggaaatggcagatttacattataatggattttcaaattcaattctttggcctctatttcattatcatccaggtgaaatgaattttgatgaaattgcttgggctgcttatattgaagcaaataaattatttactgaagaaatttttaaaaaagttaaagataatgatattgtttgggttcatgattatcatttaatgttagtaccttcgatgcttagagaaaagataaataaacaaggtttaaaaaatgttaaaattggatttttccttcatacaccttttccatcaagtgaaatttatagaattttacctgttagagctgaaattttacaaggtttattaggttgtgatttaattggtttccatacttatgattatgcaagacatttcctttcatcaattgaaagaattttaaaattagagacaagtcctcaaggtattagatttaaaaatagagatataactgttggtgcatatccaattggtattgatgttgataaatttttagatggtttaaaaaaggataatgttcaaaatcgtattaaacaattaaaatctaaatttggtgatgattgtaaattaattgttggtgttgatagattagattatattaaaggtgttccacaaaaattacatgcatttgaagttttccttgacactcatcctgaatggattggtaaagttgtacttattcaagttgctgtaccctcacgtggtgatgttgaagaatatcaaaatttaagagcaagtgttaatgaattaattggtcgaataaatggtaaatttggtacaattgaatttgtaccaattcatttcttacataaatctgttacatttgatgaactaatttcactttattcagttagtgatatttgtttagtttcatcaactagagatggtatgaatttagttagttatgaatatattgcatgtcaacaagaaaataaaggtactttaatattatctgaatttgcaggtgctgcacaatcattaaatggtgcagtaattgttaatccttggaatactgatgaactgtcagatgcaattcatgaaggtttaacaattagtactgaaaagaaaactgctaattttaataatatgtttaattatgttagtaaatatactgcaagttattggggtggtaattttgttaatgaattaaaacgccataaataatagatgtatagaatttttatttataatataatatcatatatatttacattataacccaacaataactcttatcaatcaatcgattctatcgatctttaactaagggaagtgaaaaatttaaatttttttattgccagtcttctttttcttgatagtgtgtgatcgtataataattatatacaccaataaaccttttacaatctttgtttcatcttatctccactgggattatactgtatatcatacactagaatatctaaatacaaaacaaactaacatctaatatccaattatatctatcaatatgggtaatttgatgtctactcctttaacggagaaaaatttaactcttgtacaacataaacatttatcacatgcaattggtgaaatgcaagggtatcgtttacaaatggaagatgcatattgtgatctgaatgatgtaattgaagtggaattgaaagaaagtaactcaaatacaagtccaagtctaaataataaattaaattcaataagtagtaataatagtccagcttcagtatcaagagttaatacagcttcaactgatacaagtctacagacaagtacaacaatgagtaatcctgatataaaaaatataccaattaatatatacggtgtctttgatggtcatggtggttcaagttcatcaaattttataagtgaaatattgccactgacaattaagagaagaattgaaaatgaaataaataatttatccattgaagataaattgaaattaattgaccctaataataatgaaacattacttttgattaattttcctaaaatattaaaagattgctttatgaaagttgataaaaaattttatcatgatccaaacaataatagtggttcaacagctgttgtaataatcatatttaaagattatattataactgcaaattcgggtgattcaagagctatactttcaagaaatggtaaagtgaaaaatatgtcatttgatcataaaccgaaaaatctgggtgaattaatgagaattcataatgatggtggttacgtttcacagaatagagttaatgcaatactagcattaagtagagcttttggtgat

SEQ ID NO: 17 - DNA, 275970 bp, Pichia kluyveri
  >NCYC246_000006F P_kluyveri_NCYC246_TS
cttgctgctattctagcatcactaactggatcagtaaatttattaacttgagaatcagcattagttaattcaattgaagatgaatgtacagatgtaacggatggtgatgatctaagttgagatgtattccatctaatcgatttggaggtagtgttcggctcatcagatggaacataacttgaatctgtatccataattgaaatatcaacagctaaaggaaatactgcaccaccagttttagcaccaaaattaacaccagagggtggtaactttgttgtaatctacttactctagctgaggcgtccataataaacaacagtaattgttagttaaataaactaaataaaatataaataaatataaaattaataagaaaacaacataaaagaaatattaacaaccttggaattcttcgttttatttatactaagaattccaacgttgactaataatttcttttctgatttgcgagcaatactaaaattcaattggttcttcgaggctcaacttaataatataatattactattcattattcagtctcgcttagacttaccaatctcaacaaacttattaggtattggtaaattctcaaatcttttgtatggaaacaatttatcattaaacttaacattattggaaataatgacatcttttagtgagggaataaagcatctatatgctttatgaactgatttaaaaccaactaaaataccagatactgaaacaggagaaaatgcagatgttcttttctcaggtggaactaaaacataacaagcagcaccaaagggatgaataatatcataatttggtttgtacccataccatctttcaaatggagatcgacccttaagattatcagcaggatatctattaattaaatattcaacagttttaacagcttcagaccaaaaattttcaggtaaaccagatgaaaacaacaaagtgcaaaccttttcttggatggttctatgttttctttcaacaacaccattttgagatgagttataaggaacggtcatttgatgagtaattcccttttcagcacaataagcattcatttcatcattacaaaattcaccaccaatatcggttcttaagattgcagctttatatcccccttagcagcaaataagttttcagcagtttgaataaaagattggatcaattcagtaacatttgatttcttctggattggaacaacatgggtccaccttgaataatcatcaaaaatagttaagaagaacttttcattattattacctttaattggaaaggaaccacaaacatcagcatgaattaattgaagaggtgcacttgctggaggactagtagatacttttggataaacctttgtcattttgccagctgcacatgatacacatttttcaacagatggaccaccagaataccctaatattttagagttgctggagaagggtgacctaatttggaatgcattaattcaacattaccagatgtaacatcaaatgttttggcagctactggaagataatctaaaaaatataatgaaccttcagtagaactgatttgaacacgttccccagaattctatggaagaaattgaacatcatgttcagtaaataaaaacataccaagtttagatgcttttttaattgacaaaatatttgagtagcattagtaacataatgaacatcatttaaaataatttcatgaccagtagtaggatgaactaatataagtttaccaattcctttaacttctaacgaatcttcagcaataccagaaatttgaccactaatagcttcaaattcaacaaattgatctttgtttacagcaatatgaacattggaaccaatatctaatattttcttgatataggtaatctagaattggaggccatccagggaaaaaaaccatttgaggtagtagtaaatgctgatgcaccttgtttagagacacccgatgctgatgcagaagcaggaacgggagcagtacaatctctagcatagtgaccaggagtttgacatctaagacatgtaacttcatttgggtttcttttcaagttctttttacctctatttttgttattcttaaccataaaagtttgaggaacggatggactaaaatcttcaagtgctgcttcaacagctgataaagttaaatcaggagcagcacagtctaaaacttttgctttagctaatggtgaattgaacatcttcaagtagattaaacccatcatttgattaatttccggagtattattaaattgatagcaaacattcttaaaaatagctaacgcttcaccaggagaagcaccatttgttctggcatcaacagcagaatcaactaagttagatagttctctaacagagatatgtgaatatcttcttctgatcaacactataccatgaatttgggcacttaagacgttagtagtatcaggagttaacatcaaatgtcccgaagcaaaataaacatcaacacttgcaccaacagtgtggccaacattctaccaacatagtttcccattttgggtagttcacagtagcagttagttttgcaaaactatcctttggaaatagagtcgagatttgactcataacatgttgtaatctgattactctagatgcagcgcccattattaacaaaccttgaaattctttgttttattttatactaagaattccaacgttaactaataatttcttttctgatttgcgactaaatttgattggttctttgaggctcaacttaataatacaatattataatttattatttagtctcactcagaattaccaatctcaacaatctcaacaactttttttgtaaacattacttttactttgaggagtgtaagtaaaacaacttttgatttatggtctgcagagactataatatttatacattggaccaagcaaatcagtatggattagcccaccaacattgtaatcgtggtttgccagtactcaacctttagttttattggccatactcacgcaagtaaaacatttagtgtcgcctgactttatcttgttaaaaataaatttgtttcctgaaacgtttatgaaacgttgtcaattagaagaagaaacggtcgtaaacattggaattcgtagtataaacaaaagtttaaattgtttctttttctacgttctttagttaattttgtatttaatctgttggtacattttgtttagtttctttaaataaattttactgttgttataaaatggaccccgcatagtataaaatagcacttttaagctatctgctgctgtaaactatccaaattgagaaagctatgttggtaaaactgttggccactattggtgcagaggcgtctactatgcttcaggagatttgatgttgacttctggtacccctgatgttttaggtgcacaaattcaaggtacgcttgcctcaattatttcaatctcgcttggacttaccaatctcagcttttcttagcctggtgtccatattcaatttggaaactgaaattaatattttttggtaatgtggctgctaaaacaacttgtttttaaaaccatactgctgataataatcctcatctatggttttaaaaaaattgccagcatagatgtcaattagacattacaggctatgtgtttcacgtggttttgcaggaacttttgttacatgccgaccaaatgttttcttcaacctaaacggtcttctcaactttaggacgtttgtttctatagtgaaggcaaagcaactgagttaactttattttttttggatttccatttgtctgcatttgctaatttaaattaattatactttgaaaaaaactgcttggataaacaatgattcagactgtatggtacaatgtgataagattcattacaacgtattctttttaaggataacggcactttttcttggtgatttgggagagaggaatataaatgccaacatgcttcatatgtgaaacgtaataatcagttaaatctaatgcctcaacgcctttttggtattgccaggttgccaagtactaaagcctttttggtaacataaactttatagcatcgataacttagaaaaagctgtcgatttttaatggcaatccttgcgtaaacatactatcgtagtacacttgaccacaaataataataaacaccattttcatattattactcacaatacagtggttaagtaccaaatgttgtacttattgtgaacgtagttctaaggactttgtatacggacctttctgtatcttatgtataaacatatgttaacaattagggttggtagatagtaaacttagtttgtgattaactctttgttatagaaggaataactacaagtataaaataatagtttaaagtcgacattaatgtcgagaaaattttcacctgctaatgatattcatacaaccctcttgattcagcctatcttaatttaatcaaaaagacaactggaaaccaattcattaataatttttaactaatttagttaaaatatcagctacttgtttgtcttccggaacatgagcgaccatgatgatatggcttagttagtctttctttaacagtctatgtagatttcaagtcgtgtgttgtttggagttttaaattccaatgattgtgatttgatcattaaaataataaccaggcgggagttctgattctgtccttagcattccatttgatattgtattcatctataatagatgcatgtattcttcttggttaattgtattttattagttttgattctgtcattaattttatgttcttagtacttacgatcagccagttttttataaccaaattttattagtgtatttgaaatttccaggtgcataatctttctggtatgcagttttgaatcatattggttgtaatacatttgaaatggcatgcttgagcaagtatccttctggcgacctctggacgtaatgttggtaaatatgtttctgaataagtgctaattgattgaacatcacaatcacatctagctaccaaaacgtgccttatgaatattgccaggttttttattgaataccccttttgtgtggattctttagtaattataataatataattattggttttgcattccaagtattttgtggcctcattggaatcaaatttatttttaattaaagataaccattattccgaatccggatattcactgcagcattttaagttttagaaattgcttctttggagttattggtaaaccttttgttattttattaactaatactagatgaatacgagtagtcaatttaacattcttagcattgagacgcgcactgccgtcttacaggcgtatttttttgagttttggaggtatcttttggtaaggcagtgttctgatttatcttctttactagtggatttcttatttattttggttttgtaacagcatgtgttggttgggcaattagcttagaaaaaacaagttggtttggtggtttgtttaataataaaacgtaattttccagcaggataatatccttcttattcacttgtatattcttcttattgccacactccttagctaatttcaccgtttttccttaaattaatgtttctgttgttgcccttaggtttattaattttttgctacttgatttttttctttggttggagagcaaacttttggtttgactaattttccattggatctcttcaaaggtagtaatgtgttttgaagaacagaccttctttttgacttaatccagttttaattggatcaagaggttatgttgatgggtgtcctctacctttgttgccttagacttaatagtttgactcacttttgagttactggttgcacagttggaactattgcccataggtaatttgactcgaattattatttgaattggttattgttgagatattaatttaaacaaggattcgagcccgtgaccatacaaaatcaaaacctttagaaaaagaaaccctcaaaaaattttactatataaaggaacatgtatccccacctttattcatttttcattttctcttactttcttacaactatttattttttacttttcttcataagcttttcttcataagcttttcttctatgttatttttgtttatcttatttaaatagcaacaccgaaattattttttaaccctatattaaaatggattttacagttatatcaacaaatgaatttatcctatttgtaaaatccattttagtaagtaagttaaaatataatttgttattgttgttcaaataagataagccaaagtaaaataaatagtattaaggaaaagaagaagaggaaatacaaataataaaaatgggaatacatgctcccttatatagtaataaaaaatgaatctttgtggctttgtgactttttacaggctttacggccttttaaaccgtggctcttcaaactgcggctcaaaaatatgtttaattaaccatcccaacattattatcttccattatccttgactttaacttattcatgagtagaaatttgtgttcgttttgtgtcattttgtataatttatataataatcttattttcaaagtctaatacgcacccatgatgagttcgacgtccttttaattgattttcatttacagcagcgagatctaacagattacagttttctagtgaaaaataaaattcgtgatcttcatcttctgaatcatcatccataccatacgtggtctctaatataaaataatttgcaacttctatccagaaataggatggcaacgacgaactaagtaacatcgatcttacattatttaagacagttaagtttaccctctcagcgacaccgtttgatgccggagtatatgtagacgttgaataattgatgcatgcaatgttgagatggttaatctaaactcaaagtggggtactttaccccgcatgttcatttccatgttgccgaagacggtcacacatcccttactcccgaagatggtcacactttaaataaaccccgctcggaggggttttgtttcaaagagggtaagcacttgcttttcatgttcattttgataattatataagggaacatgtattcccacttttattatttgtatttcctcttcttttctttatattatttattttacttttgttatcttatttaaataacaatacaattattattataactaatatggactttgcaaataggataacctcaatacaacaggttatgagttccttttctcacttgtgtccaaagagctctattaacacttttaaaatcagctgaaaattatcacaattgggatgttggtgtccgctccattttagctacctttgggtccggtttattggaattttttactgacggtgatttattagtctcaccggatactccggccgatgaccccagtgttgttcaattaacattttatcttaaccgggcccttcaagttgtccttattaataccgttgatggtaacattatttccaattatcaatgtgaaggcttgtctggttctgccttattagcagcaattagaagagattattctagattgtctgctcgtcaactttattcaatggttgacaagttaactaaatcatcctctatgccacttgacaagggattattatttttaaagaccatgagatctcaatttactcatggcatgaccattgatcacttgttaggtcttttatatcttcaaatgtttcgtgatccctcggtcaattcaagaattttagatgctgctgatccccaaattagtttatcagctattgaagcatctctcaaggatattgctacctcttcatcttccaatggtgctccttctgctcaagcttttattgctaacaagcctaaatctagaaacagaaaaccaaagaatacaaaagatgttatttgcagaagatgtcaacaatctggtcatatttctccaaattgtactgctgctgttcctgtttcctactaaccagctaacaatggtaataattctgaaggtgctagctagtgatgttgcttggcatgtttctgcacctgttcatgctagtgatacttatactcttgattctggtgctaatcttcatatgactaagaactttgaacattttagtgattatgtttcagctacttctgttgaaactgtttctggtatttctggtgataatttacaaattatgggtagaggtactgttattttcaatggtcataatggtcaaagaatttcaattagcaatgttgcttatgttccttaatacttcaagaaatttaatttctatcaaaatgattactagaaacactggtgctagattttcctttgataatagatactgttacatgcaagatggtacaattattggtgaatattttccagctactttatatcaatttatttttttcaccaattattcctgcaaactactctttaattgcaaacaacttgaatatgcattccagattgggtcatccatctggtagggttatgagggaattgggctactctccttcctctgagttcaaaatttgtgaacactgttctgctggtaaaatgactaaggttctccccaaaatcatctacttttaaagcaattcatcctcttcaattgattcattcagacgtttgtggtcctattaatgttcctggtttatctggtgaaaggtattttttaacaattgttgatgattttttccagatggtgttcaattttacctttggcaaccaaatctgctgcttcttcagttattaaacaattcattaacttttctgaaactcagttcacatccaaaggctttaaggttagtattattagaacagataatggtactgaattttgtaacaatgatttaaacattatttacaagataaaggtattactcatcaacttactgtgccatataattcatctcaaaatggtgttgctgaaagaaaacatcgtactgttcaagaaaagcaagaactctcctttctgaatctggtttacaatttaatttttggtctgaagttgttaaaactgctgagtttattatcaatagatatccatctgatgttctcaatggtaagactgcttacgaattatggatgggcagggttcctaattattcaatttttcattcttttggttgcaaatgcatggtattaattccaaaggaaaagagggaaaacattttttcaccggtctcagttgctggtatttttgttggatatagtccagcacataaagcttatagggtttttattcctaggattcaagatgttgttgtttcaaataatgtcaaatttgatgattcctatttcccaatgttggactctaaaaacaatattcctattatggaggacgtttctccttcagatattttctatggtggtaatgctggtggtgttcctgttattccatctggtgcttctaattctgctgaacctcttattattaatcattcaccggttcaatccccagcacctcttcaccagcacccttcctcctcatccacttcggatgctcattcaactacttcatcctcacaccctcatcttccagccttcacttatcacatcatcatcatcatcaatcatcatcatctgctccagtatctgcttcttcttcacctatgatgcaatcttctggggttgttccagataatactgaaatggtttcctaactctcctagtgttcctgaaactgttgcctctgttccaatttctgatgctattgataatattatttcacaagaagataatgatgtctccaaattttttcctgatgaagacaaattagtttcatctggtgatgaagaagaaattgattctattcctaatgattttgcttatccagtttatgatgaagttcatcaagttcctattgaaccatctttacttccattacgtcgttacagaagtgataccacttcagcatctattactcaaccaccactgcaaaagccatgtttcaaaccagaaacacttgcttcatcatctacatcatctactacaccatcatctaccacttcatcaccagcacttgctccagctcaaccatctgctattgttccaatgcaaaggtccttgtctcagctctctgatattgttgattcagttcctaagcgttccaaagcattatttttaggctccaatgccattcatactgctttttctgcatctactactgtttcatctgctttaccaactacttttactcaggctgttaattcacatgacagatccttttggttatctgctatccaaactgaattagatgctcatcaattgaatactacttggtctttggttcctcttcctgctggtcgtcgtgttattggttgtcgctgggttttcactattaaagattcaacatcaccacctacttacaaagctagattagttgctcaaggttttaggcaagtttatggtttagattattttgaaacattttccccagttgtcaggtatgaaagtattagaattgttcttgctatctcagctcaatttgacttaaagatccatcaaatggatgtttcaactgcattttaatggtactttgaatgaagaaatttatatgatggttcctgatgtgttgatgctccttctggtatggtttgcaagcttaataagagtctttatggtttaaaacaagctccctttttttggaatcaagctatcaatcaagttttatttgtctgctgactttcaaaggtgttcaaatgaatatggtatttatactaaggtgttttcctggctctattgttattgttgcttctttatgttgatgatttattaatttgttcaaataatcctgctgctgttctgatgttaaggtcttctctcttctcactataagatgaaagatcttggatgttgcttctagatttcttggtatgaatttacatcaatctgaaggaagtgttggtttatctttaatcactatctcaatgattatttggttgattttaatatgcaagattgcaatcctgtttctactccatttgctgctggttactgattttttgcctggtgatgctatttctgatgctgatgttacccgttttcgcagcatggtagggaagttattatttgctgctaacacttgtcgtctctgatttgtcatatgctgcttctacattatcaagattcattaaagatccaagagctaatcatattgctgctgctaaacatgtcttaaggtatattaaaggtactgtgtcatttggtttggtttataagaaggtatctaatttcaatttgattggttttagtgattcagattgggctggtgataagtttgatagaaagtcaattactgggtatgtatttatgatgtctggctgtgcttattacttggaagtctaagaaacaacctactgttgcattatcatctactgaagctgaatacatggcacttggtgatacagttaaagaactactttggttaattcaattgcttaaaacggttggtcttaaattcaattatccacctacaatttttgaagataatgaaggttggcaaattgcttacaagtcatcctgtccatcatcaaaggacaaagcatattgatatcaaacaccattttattagagagcatttaggtaacatggttttcaatttgaatcggttagaacagatgaaatggctgctgatatgtttacaaagaatttgaatagaatgaagtttagaaaattcaactgtaagattggtatgactcctatttcacatttggttaagtttagattatggtagggtgttgagatggttaatctaaactcaaagtggggtactttaccccgcatgttcatttccatgttgccgaagacggtcacacatcccttactcccgaagatggtcacactttaaataaaccccgctcggaggggttttgttcaaagaggggtaagcacttgcttttcatgttcattttgataattatataagggaacatgtattcccacttttattatttgtatttcctcttattttctttatataatttattttacttttgtttatcttatttaaataacaatacaaattatattttatctatattagcaatggattttacaaataggataacctcaattcaacatgcaatagcagagaaatctaataaaaagactttcttttttcagaagacaccctgcttctttgttgctaaattgacaatttcctcttaaacatagtgcggaagtgactacttatcagcccactcaaataggttataataaaatatataggcgtagttaaacatttcccttcgggaaagatgcgaatccctacttatcacaaatttataatcttacgtaatctgaaaaaaagcttttttcaccaaaaatcacgacacactttttgttgttacttaacaccgtttttacatagtaatttagaattaactccggtacagttttatgttttcaattagaacagctacaaaaatccaagagtaccattggaaagaaagaagatatttagtgtcactgtggagccacattttttttttttgattaaatcctaatttttcaaaaatcaaaaataagtgctcaaaaataggaccaaaaaaatcactaacttcagcaaccttttttcaaatcctaaacaatcggtaaacaatatgtttgtaaagtttccggtacaaccaagagaggagattacaattatccatgtccaaagtgctcaaggttaatgcccatattactggactttgttaaaaatgttgtataagggtaattctattagcaaaatccattttaataagcaagttaaaatatagtttgtattgttatttaaataagataaacaaaagtaaaataaataatataaagaaaataagaggaaataaaaaattataaaagtgggaaacatgttcctttatataataagattttcactttgaaaaacttcatttttcaaggtgagggtttcttatattggtttctcttcttatggtgaggtttcaaattcttgttgagggtttcttcttctaaaggtttgattcttatagtcacgggttcgaatcctagtttagattaatatctcaacaaaaaaacgcaaatttcaaactaaaaacgtttataactccaccaatacttagtcaaaacaaaaactaagtacatgattggatagaggaaaagcgcggctacaaatgtgatatttatgagatactggtgaggaggaaaccatagacttaggattcaggaaaattttcttaaatcgctaaaaaacatattataagtagggatacagtggactggtagcttaattaacagaggaaatgcaacagaagatacattgaagtgtcaacaatacgtcttagatgttaattaacttatagtttcagtatctatccggatattccttttgatgaaaatctgtaaaagtagtgagaacacacttgtaaaaatagtaagaatacctttgcaaaatagcaactaaaacatcgaagtaacaatacagctaaaatcataccatcaagtaataaacactataacggcattgaagtatatcaacgacttggtaaaataaaaaaaaaagaatatctaatagtcacattaaataagcaatatcaaacagcaacaaagcataaacttttcttttccttgtcatattattatgttattaagcagtaagtaagaaaaaattggggcaagttcgccaacaatgaaacattttctgcatttccccaacagacagccattgcgctttgaagtttgcaatgaataacgtttcttatcaatgaaatatttttacaatatcaatctgtgatagttcaaaggctttatttcattggggttgaataagttaaattgtaacagctaactaatgttaaaactattttgccaagtaatagttgttcaataaatccaaagtgttgatatggttaatctaaacagtaatttctaagcctcaactaagcctcaattaaatgcctcaattaaatgcctcaacttaagcctcaattaaaatgcctcaaagtttcactttttcattactatataagggaacatgtattcccacttttattatttgtatttcctcttcttttctttatattatttattttacttttgtttatcttatttaaataacaatacaaacttatattttatctatattagcgaatggatttttcaaatagaattaccctcatacaacacaaagataaattgaaatgaacaataactaacacgcattccatgtcaatgtttaaaagttttatcaacgtgcctttacacataaatgttttgtcactgatatccggtttaagtttgtggaaaagaaagggcatcagggagacaaagtaaagaaacaagaagggggtattatgataatttaactaagcggtgcatcatcattagaaaagcagctgtaaatatttttattatttttattacgtatccgagtttaaaattttgagattttcaactttactgacaaatttgaattgttaagccacatcaattacatccttactaatggtaaaaattgaattatacctagacactatgttagagtctcctgaattccagatttacagtgatactatacatttgtaaatacgtagttatttagtttataaatagtcaaagtttgaaaattggtcaaatttttggaaaaaatggtgcttctcaggggtttgcattaatatacaaggtaatactaaagtatcttaaattaaaaaaaaattctatcttataccttcttgacatttcaaaggtctcgttatatacctgaatacattttgcagctggccgtttgcggtgcattccattctggcaagttcagtatgccagcacttttataagttgtttcaatacaaaagtgtaaattaatattttggcaatcagcacaaattaatttaactcattttatgttggctgtttgatttctagttttgatttaaattttaaaagccattgttagtcggcacaataatattatcagttaatattataggcacaacactatggatcctgcccaaagagtcgttagattgcaacaatttaaataacaaatatgcacaaaaaagcggtcgcgtcagtgttgcgtcgcttggcccaccgacgcttaatgtgccaaattatacagactttgaaggaaacttgttatttctgttgaggttgtaattctaagcaaaactaaattaaatacataaaccgtagggtggtgttcagagctaaatattccttctatatcatcctccaaatcatcatctgtctcattaaaaacaactgatccatatagttataatcatcttcctcgacaacattcgccatttcagcaacattccttcgaaaataatcgagtcaaactccgagttgacagagtaagtactttcatttgcaattttagattcttccgccaaccaaccttccagtaacagctgcacaaacaacattcagtattttgttgtctgacagcagatccctttaaacagaacctgacattgtcgatatttgtacaacgagataatgggacataaagttgaccatgactaaaatcatcatttggaaggtaaattccaagcttactattggaagtttgaccttgcgctttcatagccgtcatgaaaaaagaatactcttacggaaattgtctccgggtaaattctactgggaccatttcacaaggtggatgataaaaataactataggaatttcaacttcggtgatttttatgttttccagacagaatgcggcattttaaccacataccattaacatcatttctgatattcaatacactcattctggtaccgttaaccaaacctcttactgcatctatattccgtatcaagacaactggacaaccgaattttagtttcaatatatgttcaggaaatccagccttactatgactatcaactctatcttgccaaaacggaagaaaacgtccatcaaagaatttgaacaaccaacaataattttttgatacgatttaacgagacagggatcatttttgattctcctcaacattattttgttaatttaatcaacatccaaatttttaggaattagcacacaccttgaagcatacatttcacataaatcgtttgaagagtgtgagttattaagaggccccgtattattaagaatatttgtagtgtaaacatctgttaaaaaatatgattttcttgaagtcgtatattactgtgaatcaaccacacctaaatcttgcatcttttcaaaacctttaccatttggtaattttggtcccattcccaacttcaaaagagctgttgcttgagcttgccttctttctctatcttttagtgccacagagtacatgattcttatattttcacttaatttaagatacttaatcttatctgcatatgaaagacataaaaatggttttctgtaaacttcatataatgtaggattacccttagcaacaggtaaaaattgacgaaaatcaccggcataaacaagtacacaacccccaaaagaaacatcaattcccttttcttcccttaaaagtctatcaacagctaaaattacagagtttggagtcatcggtatctcatcccaaaatatggttgaacaattacggacaatatttctctgaattagagtggcggtgcaatttactgtaggagattaaaacatactaattttctccgtcaaaggaatggcaaagaaactaaatcacaattcttacacgcactctctaatttcgtatcatcatttactagtaagcgaacgtaaggcggctggataaattctctttatcatgaatttataatccagtaaccattctgttctttatttctttcttgtaattttttactggtattaattttatagaagtacagagaagggaaaaatattttcaaacttttgatcataacgttcaataaaaaaaatttcccactgccagctagagcgtcaagaaaaaaaaaggtattatcaatagagtccctgtcagccactctgttgcaaacagtatcataatgttccttttgctttgttgtcaaacgagaaacccgctcatttatttcatcttgcacgctatatagcaacgatggagcaacaaattgtgctaccaacctctcgtcttctttcttgaagtgcaagtttaaaaagggagcatccctatttaattctgcaaacactgttaataaataacatcttccttgattttcttcctcctgtcttgtagactggtatttttatttaactgcatgccataaaacccgaaatgtttatctgataaatcttctgttaaatgcaaatgaacaacagtaataaatttagatgggttcaacaatacaattattgatcaataacatattaacaaacgaacgaaaacgggcaggagtgcctctgatatttctaacacattgaacatactcatcatcattttctataagaccttttgcattgcatgccgctttgtaagtttaatagccacacttgaaatcatcaaaatattttggactttctacaactcccaaaagaagagagacataatactggtctctgtatgttaccatacataaaacagatggaacaaaagctaaagcatcagattttcttatacgtgcaacccattcatttttgtttagatcccatctgaatatattgttgatgtcttcatacaaaaacggcgttttcaaggccgcttcatcaatatttttaaaaaacttgtatagtttcttgttttaaaacccagtttctgtgtgggcatgaagggcaagtataggtggcctaatacccgcaaatggagcattgagagcatctcactgatatatctacctcgaataaattctttgattttatcacgaggtaatgtatttcgtgtaccatcatccacaacatgttctcttctcctaccaagagtatcagctcttttggccatgtatttgaacaagtattttacaacagctgctgatccagcaaaatctaaatttacatgacatctatactttttcagtaaaattggattcatatgaaacaatatttttatcaccttcacctctaggtggtagaattcttccaccattagtatcacatcgatcaagtctgcattcatgcatcattcttgattcagccagacttttcaactcctcatcttctggcatgcatctcttgataactttatcaccttgatcattgacatattccaactccgggcagcacaaaaccatacgaatatgtggtaacccacgttttgaaattcagtgattcatgacctagatacaatttccaaccctaaaatcttgtgaagatttttatcgagaccacggacagtttgttggaatgttccggcagctaaatcctttgccggttctctagatctattgtactgaggaatagagtctcccagttccattgcaagtgctgagttcatggtaactgttaaaaacaaatttggtgcacctgtggcatcacaaagagccattgtttttaaaacgaattattcaggtatgatggagtgcctgcaagtttagtaggtacctttgtttcagttattgattgtctattaacaccttcagttacatcaatactgttgtaatctaacgactctttgggcaggatccatattttacaacaacaacagtattaaaagaacaaactatataaactataacataactaagattatacaaaatatcaacagactcgatattaaacctaggaattcttcgttctacttatacttataattccaacgttaactatcgtttcatttcacttgcgttacttttctgctttataacattaatgttctcgtttctttttctgtttacaacatttcacaaacaattctttttctgatttgggagcaatacttaaatgtattcagttttcaaggttcaacttaataatacaatattattatgtattattcagtttcgcttagaattaccaatctcaacatgatattatgaaacatctttaaattttgcatcatctggcccgttatttttcatgtttgtctcaaatgataattcaacattcattcttaaaatttttcattgtttcttaatatttgatggtatatcattagatgaattataaattctatttcacaaatattcaagatatgttatttgatgactttcctcatatgactcaggttctattttttcttattgaattttagcaatagattcactccataagttttccaaatattcatgtgtccgactcttaatgtgaatttttctaataattttgataaaattgggttaccacggaaaattgtatgaatttaaataagacttgttgttgttcttgatttttaagtaatatattagaatttgagagctcatacttaattaaagtttttaaatattcttcttccttttgtaaactctgacaaaaatcaagtaatactgttggccagaattctaaacttttggttgtactgtataaaataagcatctctattttagaagttttagaatattttcaaaacttttatatttgttagttaaaagtatattattttcaaatatatccaaattgactattaaatcttcaataacttgatttcttaaattatataaataggcgttcttcttaattaattgactttaccggctaaatcacccaagatgacaaaatataaacctactgtcgcatctgaattatcaccttctatgtatctatattatttgacattggcaattcaatttcaatcaattcttttcaaaaagtcggcaaattgtgactccattatttcctgtgatagcgtccgttcatttcttaaatgaatatctttaataaatttctttcccaaatattctgctgttgagatacaaatgtttcattgttactataaatagatgtgtttcatctaggtttcatctatttatagaaaagactagaccatatgatattagtaatacttatgattactaatgcctcatatgatgacaaatacaaacatgaaacatttgattattaatcaaaacaccaattatcttagacataaatttgtccatataaagagaagtttccatttactctttactgttctttaacttacttattgtttttctttattataacttatatattattatttctttttataaccttaaagtaactaactatggatatctatactagagccgttaccgttcaacaggttataagccactttgctctagcttgtccaaaggacgaatcctctaagttggtttctgctgttaactatccaatgtgggataatatgacgaaaatgacattggcagcccaaggtgttggtatggataattactttgaatctggtgatatgttgatcccagatggtgatacttcagatgatgttaatatcttgaagttacaatcagctttggaaaatggtatccaaactgttttgatgaacactgtttcaagaaagattttgagaaaatatcaaggttctaatctttttggttataatttgttgtgtgcaatccgtcgtgattatgctaaagtctctccgagacaattgtttgatatggttaagaaagctgctgatgctgctttgaacaaatccgcttctgatgaaactgcggtttctcttttaagagatatttgtgctcaagctcctactgttcaagagcttactggtttattttatttaatgatgttcaagtctgatcaggcttgttcaaggattctggatgctccagatcctgatgttaatttgtctgttgttgaaaacaagttacgtgatatggtatcttcggtttcaactagttatgctgcaagtggttccaaaaccacttcatccaatgttggttcttcttcttcaattatgtgctacagatgtaataagaaaggacatactgcaagaaattgtttagctccagctcctgcttcaagaagcaagtcaaatacttcagattcaaaaccaaaatctgaatctaataataacagtggagttggttggtcagtctacaatacaactgatgttacagaagtagctagagaaagctatgttttagattcaggatccactttgcatatttcaaaggatattcgccattttgttcatttccgtgaatacactggtaccatcactggaattgctaacacccatttaaatgttacaggtgttggtactgtcgagtttatcgatcctgaaacatcattcaagattactttgaatgatgtttgttatgttcctgatgccatgcaaaatttaatttctgttaagaaggcttcatcaacaggtgcttctactttttactccgatcatgcaatgtttaccaattctgctgacaatatttcaagaaaaattgctacattgaaagatccttatctgtatgttttggattttccacctagggttacaaggtatgaaaacgcaactgtgtttctcgctagaccaccccttagaactttgaatgcacataatgcactgggtcatccatctcctcaaacaatgttacaactggaattttctgatgctccaaatatgattgaatgttcatcttgtgcagctggtaagtcaactaggacctttccaaaagctggttattctcctaaatcaactgttcctttgcaacttctccatgcagatttatgtggtccaatttcggttgccggtattggtcttgaaaaatattttttaactattgttgatgacttttctagatggactcagattgttccattagaagtgaaatcagattgcaacaacgctgttatgaattttattaaaacagctgaaaatcattttagtggtaaaggatacaaggtatctaaaatcagaaccgataatggtactgagttttgcaacaaaattatggatgaattttattatgaaaaaggtattttccatcagaaaactgttccttactgttgtataagggtaattctattagcaaaatccattttaataagcaagttaaaatatagtttgtattgttatttaaataagataaacaaaagtaaaataaataatataaagaaaataagaggaaataaaaaattataaaagtgggaaacatgttcctttatataataagattttcactttgaaaaacttcatttttcaaggtgagggttttaacttcttgatgagggtttctcttcttatggtgagggtttcaaattcttgttgagggtttcttcttctaaaggttttgattcttatagtcacgggttcgaatcctagtttagattaatatctcaacaccctaccataatctaaacttaaccaaaatgtgaaataggagtcataccaatcttacagttgaattttctaaacttcattctattcaaattctttgtaaacatatcagcagccatttcatctgttctaaccgattccaaattgaaaaccttgttacctaaatgctctctaataaaatggtgtttgatatcaatatgctttgtcctttgatgatgaacaggatgacttgtaagcaacttgcaaccttcattatcttcaaaaattgtaggtggataattgaatttaagaccaacagttttaagcaattgaattaaccaaagtagttctttaactgtatcaccaagtgccatgtattcagcttcagtagatgataatgcagtagtgggttgtttcttagacttccaagtaatagcacagccagacatcataaatacatacccagtaattgattttctatcaaacttatcaccagcccaatctgaatcactaaaaccaatcaattgaaaattagataccttcttataaaccaaaccaaatgatacagtacctttaatataccttaagacatgtttagcagcagcaatatgattagctcttggatctttaatgaatcttgataatgtagaagcagcataggacaaatcaggacgacaagtgttagcagcaaataataacttccctaccatgctgcgaaaacgggtaacatcagcatcagaaatagcatcaccaggcaaaaaatcagtaccagcagcaaatggagtagaaacaggattgcaatcttgcatattaaaatcaaccaaataatcattgagatagtgatttaaagataaaccaacacttccttcagattgatgtaaattcataccaagaaacctagaagcaacaccaagatctttcatcttatagtgagaagagagaagacctttaacatcagaaatggcagcaggattatttgaacaaattaataaatcatcaacataaagagcaacaataacaatagagccagaaaacaccttagtataaataccatattcatttgaacacctttgaaagtcagcagacaataaaacttgattgatagcttgattccaacaaaaaggagcttgttttaaaccataaagactcttgttaagcttgcaaaccataccagaaggagcatcaacaccatcaggaaccatcatataaatttcttcattcaaagtaccattcaaaaatgcagttgaaacatccatttgatggatctttaagtcaaattgagctgagatagcaagaacaattctaatactttcatacctgacaactggggaaaatgtttcaaaataatctaaaccataaacttgcctaaaaccttgagcaactaatctagctttgtaagtaggtggtgatgttgaatctttaatagtgaaaacccagcgacaaccaatagcacgacgaccagcaggaagaggaaccaaagaccaagtagtattcaattgatgagcatctaattcagtttggatagcagataaccaaaaggatctctgatgtgaattaacagcctgattaaaagtagttggtaaagcagatgaaacagtagtagatgcagaaaaagcagtatgaatggcattggaacctaaaaataatgctttggaacgcttaggaactgaatcaacaatattagagagctgagacaaggacctttgcattggaacaatagcaggtggttgagctggagcaagtgctggtgatgaagtggtagatgatggtgtagtagatgatgtagatgatgatgtagatgatgaagccagtgtttctggtttgaaacatggcttttgcagtggaggttgagtaatagattctgaagtggtatcacttctgtaacgacgtaatggaagtaaagatggttcaatcggaacttgatgaacttcatcataaactggataagcaaagtcattaggaatagaatcaatttcttcttcatcaccagatgaaactaatttgtcttcatcaggaaaaaatttggaaacatcattatcttcttgtgaaataatattatcaatagcatcagaaattggaacagaggcaacagtttcaggaacactaggagagttaggaaccatttcagtattatctggagcaacaccagaagattgcatcataggtgaagaagaagcagaaactggagcagatgatgatgatgatgatgatgatgagcttgataatgaagctggggatgatggtgatgatgaagtagttgaatgagcatccgaagtggatgaggaagaaggtgctggtgaggaaggtgctggggattgaaccggtgaatgattaataataaggggttcagcagaattagaagcaccagatggaataacaggaacaccaccagcattaccaccatagaaaatatctgaaggagaaacgtcctccataataggaatatcgtttttagagtctaacattggaaaataggaatcatcaaatttgacattatttgaaacaacaacatcttgaatcctaggaataaaaaccctataggctttatgtgctggactatatccaacaaaaataccagcaactgagaccggtgaaaaaatgttttccctcttttcctttggaattaataccatgcatttgcaaccaaaagaatgaaaaattgaataattaggaaccctgcccatccataattcgtaagcagtcttaccattgagaacatcagatggatatctattgataataaactcagcagttttaacagcttcagaccaaaaattaaattgtaaaccagattcagaaaggagagttcttgctttttcttgaacagtacgatgttttctttcagcaacaccattttgagatgaattgtatggaacagtaagttgatgagtaatacctttatcttgtaaatagtgttttaaatcattgttacaaaattcagtaccattatctgttctaataatactaaccttaaaacctttggatgagaactgagtttcagaaaagttgatgaattgcttaataacagaaggagctgcagatttggttgctagaggaaaaattgaacaccatctggaataatcatcaacaattgttaaaaaatatctttcaccagataaaccaggaacattaataggaccacaaacatctgaatgaatcaattggagaggatgagttgctttaaaagttgaagactttggaagaaccttagtcattttaccagcagaacagtgttcacaaatgttaaaattagaggaaggagtataacctaattctctcataaccctaccagatggatgacccaatctggaatgcatattcaaagtatttgcaattaaacaataattctcagaaataattggtgagaaaatgaattgatacaaggtgtttgaaaaatactcaccaataactgaaccatcttgcatgtaacagtatctatcatcaaaataaatcctagcaccagtgtttctagtaattgttttaatagagattaaatttcttgaagtattaggaacataagcaacattgctaattgaaattctttgaccattatgaccattgaaaataacagtacctctacccatgatttgtaaattatcacctgaaataccagaaacagtttcaacagaagtagcagaaacataatcactaaaatgttcaaaatttttagtcatatgaagattagcaccagaatcaagagtataagtatcaccagcatgaacaattggttgagaaacatgccaagcaacatcattagtagaaacttcagaattattaatattgttagttggcttagtggaaacaggaacagcagcagtacaatttggagaaatatgaccagattgttgacatcttctgcaaataacatcttttgaagtctttggttttctgtttctagatttaggcttgttagcaataaaagcttgagcagaaggagcaccattggaagatgaggaggtagcaatatccttaagagatgcttcaatagctgataaactaatttggggatcagcagcatctaaaattcttgaattgaccgaaggatcacgaaacatttgtaggtataaaagacctaacaggtgatcaatagtcatgccatgagtaaattgagatctcatggtctttaaaaataataatcctttgtcaagtggcatagaggatgatttggttaatttgtcaaccattgaataaagttgacgggcagacaatctagaataatctcttctaattgctgctaataaggtagaaccagacaagccttcacattgataattggaaataatattaccatcaacggtattaataaggacaacttgaagggcccggttaagataaaatgttaattgaacaacactagggtcatcggccggagtatccggtgagactaataaatcaccgtcagtaaaaaattccaataaaccggacccaaaagtagctaaaatggagcgaacacccacatcccaattgtgataattttcagcagatttcaaagtattaatagatgactttggacacaagtgagagaatgaactcataacctgttgtataagggtaattctattagcaaaatccattttaataagcaagttaaaatatagtttgtattgttatttaaataagataaacaaaagtaaaataaataatataaagaaaataagaggaaataaaaaaattataaaagtgggaaacatgttcctttatataataagattttcactttgaaaaacttcatttttcaaggtgagggtttcaacttcttgatgagggtttctcttcttatggtgagggtttcaaattcttgttgagggtttcttcttctaaaggttttgattcttatagtcacgggttcgaatcctagtttagattaatatctcaacaatgaacactggaacctgtatctaacaaatatttgtctgacatcggtaacctaagattggaggccattgttgagattggtaattccaggcgaaaatgaacataaaatattgaattggttagtttagccttgaagaaacaatcaaatacaagaattgttcacaaatgagaaaaagaaacgagagcattagtgtcgcaagtgaataaatcaaatcaagaatagaaatgatagtcaacgttggaactctaagtataagttgaacaaagaattccaaggtttaataacttttctgttggtattttgtatattttaagttattttataatttatatagtttgttcttttaatactgttgttgtaaaatatggatcctgctcaaagattcgttagattacaatagccacccaggcaaatttttttgagatagtagtagtaaatgctgatgcgccttgtttaggagcaccagatgccaaagcaggagcagaggcagtgcaatatctggcataatgaccaggagcttgacacctaagatggcttcacttggaaatgatcaaaaatggaaagttgttgaaattttcaataaaaatcaagaaaatattgaaatttacacatttttcaaaaaaattatataaagagaaattcaaagattgatttgattattgaggtggtaaaataaaaaacccaattgaattggaaagcatgctttgataggcggttggctagaatcacaaatcagaattatgttgactataaaaaattgtttgtatatttgatctaaagagtattgttggttcagtattaccaaaggaagaagcctatgaataatatatgcgttcaagtaaacaaattgtataaaattttacattttaatggaatgaatgtaaaagaaaaaaagtagcaagtatcaaataaatttatttagtggatctttttatttgtgctttagtatgacaagtaaaaccaaaacaatctgtatcaattatttgttggtgttgagattgttaagattggagactaaataataaattataatattgtattattaagttgagcctcgaagaaccaattgaattctagtgttgctcgcaaatcagaaaagaaattattattcaacgttggatttcttagtataaataaaacgataccaaggtttgttaatattacttttatgttggttttcttatctgttttatatttatttatattttatttagtttatttaaataactattactgttgttaataatggacgctgcatctagagtaatcagattacaacagttggcactataatcaaattgttgtccccactcaagagggatttatacaaaactatacaagatactagactttttttatattaaagtatctactgcatcattatctacatcattatctacatcattatctacatcattatctaccacttcaacaccagcacttgctccagctcaaccatctgctatttttccaatgcaaaggcccttgtctgagctctttgatattgttgattcagttcctaagcgttccaaagcattatttttagattccaatgccattcatactgctttttatgcatatactactgtttcatctgctttaccaactacttttactcaggctgttaattcacatgacagatccttttggttatctgctatccaaactgaattagatgctcatcaattgaatactacttggtctttggttcctcttcctgttggtcgtcgtgctattggttgtcgctgggttttcactattaaagattcaacatcaccacctacttacaaagctagattagttgctcaaggttttaggcaagtttatggtttagattattttgaaacattttccccagttgtcaggtatgaaagtattagaattgttcttgctatctcagctcaatttgacttaaagatccatcaaatggatgtttcaactgcatttttgaatggtactttgaatgaagaaatttatatgatggttcctgatggtgttgatgctccttctggtatggtttgcaagcttaacaagagtctttatggtttaaaacaagctcctttttgttggaatcaagctatcaatcaagttttattgtctgctgactttcaaaggtgttcaaatgaatatggtatttatactaaggtgttttctggctctattgttattgttgctctttatgttgatgatttattaatttgttcaaataatcctgctgccatttctgatgttaaaggtcttctctcttctcactataagatgaaagatcttggtgttgcttctaggtttcttggtatgaatttacatcaatctgaaggaagtgttggtttatctttaaatcactatctcaatgattatttggttgattttaatatgcaagattgcaatcctgtttctactccatttgctgctggtactgattttttgcctggtgatgctatttctgatgctgatgttacccgttttcgcagcatggtagggaagttattatttgctgctaacacttgtcgtcctgatttgtcctatgctgcttctacattatcaagattcattaaagatccaagagctaatcatattgctgctgctaaacatgtgttaaggtatattaaaggtactgtgtcatttggtttggtttataagaaggtatctaattttcaattgattggttttagtgattcagattgggctggtgataagtttgatagaaagtcaattactgggtatgtatttatgatgtctggctgtgctattacttggaagtctaagaaacaacctactgttgcattatcatctactgaagctgaatacatggcacttggtgatacagttaaagaactactttggttaattcaattgcttaaaactgttggtcttaaattcaattatccacctacaatttttgaagataatgaaggttgcaagttgcttacaagtcatcctgtccatcatcaaaggacaaagcatattgatatcaaacaccattttattagagagcatttaggtaacaaggttttcaatttggaatcggttagaacagatgaaatggctgctgatatgtttacaaagaatttgaatagaatgaagtttagaaaattcaactgtaagattggtatgactcctatttcacattttggttaagtttagattatggtagggtgttgagatggttaatctaaactcaaagtggggtactttaccccgcatgttcatttccatgttgccgaagacggtcacacatcccttactcccgaagatggtcacactttaaataaaccccgctcggaggggttttgttcaaagaggggtacgcacttgcttttcatgttcattttgataactatataagggaacatacattcccacttttattatttgtatttcctcttattttctttatataatttattttacttttgtttatcttatttaaataacaatacaattattattataactaatatggactttgcaaataggataacctcattacaacacttatttttgaaataggatgcatacattcttgagaacaattcaaaaaaaccagcttcacgcataccaaaatatgaagttttgttacagaaaccgtcattggtaaacttgaaattaaacatatcacttctttccataaaagtttttaatgatattgaagactcacgtccttctcttggacctaaaattggacaaatagctaaaaatctatggaaaaatagtaaatgtacattgaatttatagtcttcttccaaagcagtcatttgagctccatgctttttagttactgcacttatcttccaaggagaatttgttatccattcaggaaaggcaacagagagatgcttataagttgtgtttcctgaatattttttaagataccccgataaacctgtaatgaatctaaaaacatcacctatataaataacccttgaaacaatgcttttatgaatagattgactttccgaataaactgcccttttagtatagtttaaattgatatcataaaatggagaaaacacaaagtactcatttcgaaataaatcaaaaacaacaaacataattatattactatcagcttccgaataaataggaaaaattaaaacagttctcctgtgtttaaatttggtagaagtacaatgtgaagtaaattctgccagaggaggtgtcttcaaaaaggcaccaaccaaacctgaataggtacaatcatctgatagtgagtttagctgaacatcatgtgctttaggatgaaaaacataaatcaaaagatcattagggggattatttcttaagcttctaagatattcagattgacctaaaagtattgaaatctgtgtaatacagttgtcaagtgtattggtagttaaatcctcgaactcgacgtttggaatatcaagatgagagaaatagcaaggattgtagtgtatttcaaccataaaacaggatcaagaaagaaaagaactaaataaacatagattgaaaaaagtgggcgatttggaggcaaaaccgacaaaaacaacaacaacgcgtttagtctgccaaaataagatcggtcatcacgatcagccaatgattgctcgcttaattaatttttccacatatcgatgttatttccttttttagcaatctattattttagcgtgtgaggaaaaaaaacaaattcacctctctttattgcatattccaccttcagcagcaagacctcgtattcttttgtatttttttttaaaataacctagcagtgtaagacacatactacacaataggttgtaagatatgtaaatgattaatataaacctatttaatacatgtaaattgaaattgtaaatttcttttatgcagaagttcttatgtcgtaattaacctaagataattgatatagactcatcgacgtgtaaaaataattaaaagtatgttttttaccttcctaaaattcgcccacaaaggtttcccagtaaaaaaaatttcccaccagggttcccactgatcatttcgttattatcataaaaaaaattagacgcatttaatgcgtttaatttttcaaaaggcgcaattaaatagacagcgcgcgcaaaaaaaaggaacaaaaaaatacatcaaaaattgttcagtgacgttttactggatgcaccgttattttgtaagaatttttatctaacatttccgaaatgacaaaaggaccttcaaaattaggatcagttttgtgatgtttagccaacttcttggtttgaacatattcaccaactgaataagtattatgatttgcctttggatcatttagtaatttcaaattttgtctagcaataaatcgtttgtttactagactctttctttctttttctctatcatcttttttctcaagttgtaaaatcacagcatcaatcatgttgacatgaaattgtttatcattgaataactctttgacatatttactaatttcagcatcttctgttttatcaaaactggaataaccaaataataattgtgatggggatgtatcaaaaatagttgtagaattattgtacacattcacagcacgaaaaacgtaaataggccagtttgccattgtaggatcaacagatttcaacaccttttttattaaaccattgactttttcaactctactattagcctgtggataatactttgagctaaaatgccatttcaaattaaatgtctttgcaaaatcttgtgtagcttcagctgtaaaaggagtaccattatctgaaacgatttctttcggacaaggaaaatacctagttaaattaaccaaaaatgaaacaacagtttctgaggtttgataaacaacaggaaaagcaacacagtaaccactaacatattctacggcaaccaacacatattgaaaatgtgaaataccattattatcaaaataaaatgaaacatctaaaagtggaccaataaaatctatgtgccaaacttggccaattgatggagtgtaaaggagcagggatctgactaaatctagaaaatagatcacaatgcttgcagttcttgacaataattgcggcaacagcttttgcttgtggataaaaaattttactttcagcagctaattctaatattacctttggagatccatgatatttatgatgcttttctaaacaaaaagttgtgaattcagctgtagaaacaactttcaacaaatgaggttgtgaaataaaatataacactgaatcaattattgtaaaatgcttagaaaatttcttaattcttgggtgaagtgatccaactgtattattaagcatggcatcttttaattgtaataaagatttttctgaaagggatagacatttttcaaaaacggtaaataatgggggtgtgtattccaaatcgtcacttgaagtttgttctgataggggaatggatgatgataatgctgatgatgatgatgatgatgatgatgattcgactgtatttaaatcataagttttctgagaatcaagagaaaatctactgagaaaatcagcaggattagtttttcctaatgtatatttaattgttaaaggataagtagacaacgtttctaaaaattttaaaatccttggattcaacatcgaatttttctttgaaatactgaccagcgcttgatgatctgtatagacaatgatttcatctgataataataaataatttgacgttaaagctaaaagaatacctaacaattctctttctaaagttgaataacgagattgtgttggcgtaaaagattttgaaaagaaggaaattggtacaaatcttttattattgtttttgtctacttggaaaattaagccacctgcacctttatctgaagcatctgtataaatgtaaacagtttcttttggattaaataattgtaaaccaacagaatccttaagtaattgtttaatcatattgaaattcttaattaaaatatcattacttatagaggaagtagatgttttttgtgatgtagatgaattctttgattgcataaagtttgtgaagactgttggagatgcagcaagtccaaatggtaatttcttgaacatataattgccaaattgagttgtaataccaatagcatcaccttgaggatctcagggaacattgtaatatgcactttttaaatctaatgaagtataaatagtaaaaccaaacaaattttaaatgatcaatgaaattggtggaattagagaatttccaaattgtaaagatttattgatttgacggaaatcggtgacaactcttattttatccttttgtgaagttgggaatataggggctagagcaatcaattcttcagttttaacaggggatataactttatttgtcattgcatctgacaaaaaatctttaattgctttggaatgaatagtttttgcataaaatggggaaggtttatgataatcgaaatcttttaaaataaccttgtatttaaaattatgctttgggattgctgagattgaatcactgaacaatagtggatatttcttaatgtaagtttcattgggatcatttgaaatttcaacttgtaaaatctttaaatcatctgattgaatattaggaaaagaaatcttagcatcttttactgtaagataatcaacatcagaggtttttttatatttcaacttacttaacaatggtttaccaaaaataaccttggatgtacctttaataggcaaaatgaggaaataatcaataataaatggaaatggataacaaccggcgtagggaaaactgatttgaagtttcacaatatgattacattttgtggaagctccaaaagcgggcacaacatgataagttctttttgacaaaaacttaccaataacaacaacagtgggtggcagatctaatagagtatcagaaaatatgatattcactgcggcaccagtatctaagagtatcttagcattgggaattgctaaggttcttatcaaccatggacaaatttgcaaaagtaaaatcatctggaattggaatttcaccttcatagtcatttggtaattcctcaatatgagtttgaaattgaaaacttctgcgacttctttggaatattcttcttcttcttcagcttctgaaaccatattatcttcgtctgcaactgtacaaggacaagtaacttcttctctaaattcatcatcatcgaatgtttcggtaatgacattgaccgatttattgtaagtttttttatggttgttaaacctaaacttactgttcttgaaatctttgtattttgcagcagcatgtttacaattagcacaactgcatgtttgaaccaataatggattcttctattagaattgttcttattataatcattcttgttattgtaatctttattgttgtaattcttgtttttggagtattttaacggaaatttattgacaatagcgttaaaagtaacattcttattagtattaccagtagttgctaatggtgaattaatttttggcattaaaacagtacctaaatatctatgaacaatatcttttaaatcatttaaagatgaagctcttaacatgactgcttcatcaatatgtaactttgcaactctggcggtagattttaaagcaaatttgataatgtcatttgctgcattcttaatgaatggggcattctcggcagcgttaatccattcttcaaaaaattttgacatggtagtatctgtattgattggatgataatctgggtaatgcatgacttcacaaaaattttctcctcatacttatcgaaattaaaattttaaaagcaaaagataacaaaggaatcgtaagtgtttcccttatatctgtttaataagttctcagataaggcatggcctggtagagagtttaagttggcgtcaatcatggcaccatagtggatcaggtaatgttgtataagggtaattctattagcaaaatccattttagtaagcaagttaaaatatagtttgtattgttatttaaataagataaacaaaagtaaaataaataatataaagaaaataagaggaaataaaaaattataaaagtgggaaacatgttcctttatataataagattttcactttgaaaaacttcatttttcaaggtgagggttttaacttcttgacgagggtttctcttcttatggtgagggtttcaaattcttgttgagggtttcttcttctaaaggttttgattcttatagtcacgggttcgaatcctagtttagattaatatctcaacaccctaccataatctaaacttaaccaaaatgtgaaataggagtcataccaatcttacagttgaattttctaaacttcattctattcaaattctttgtaaacatatcagcagccatttcatctgttctaaccgattccaaattgaaaaccttgttacctaaatgctctctaataaaatggtgtttgatatcaatatgctttgtcctttgatgatggacaggatgacttgtaagcaacttgcaaccttcattatcttcaaaaattgtaggtggataattgaatttaagaccaacagttttaagcaattgaattaaccaaagtagttctttaactgtatcaccaagtgccatgtattcagcttcagtagatgataatgcagtagtgggttgtttcttagacttccaagtaatagcacagccagacatcataaatacatacccagtaattgattttctatcaaacttatcaccagcccaatctgaatcactaaaaccaatcaattgaaaattagataccttcttataaaccaaaccaaatgatacagtacctttaatataccttaagacatgtttagcagcagcaatatgattagctcttggatctttaatgaatcttgataatgtagaagcagcataggacaaatcaggacgacaagtgttagcagcaaataataacttccctaccatgctgcgaaaacgggtaacatcagcatcagaaatagcatcaccaggcaaaaaatcagtaccagcagcaaatggagtagaaacaggattgcaatcttgcatattaaaatcaaccaaataatcattgagatagtgatttaaagataaaccaacacttccttcagattgatgtaaattcataccaagaaacctagaagcaacaccaagatctttcatcttatagtgagaagagagaagacctttaacatcagaaatggcagcaggattatttgaacaaattaataaatcatcaacataaagagcaacaataacaatagagccagaaaacaccttagtataaataccatattcatttgaacacctttgaaagtcagcagacaataaaacttgattgatagcttgattccaacaaaaaggagcttgttttaaaccataaagactcttgttaagcttgcaaaccataccagaaggagcatcaacaccatcaggaaccatcatataaatttcttcattcaaagtaccattcaaaaatgcagttgaaacatccatttgatggatctttaagtcaaattgagctgagatagcaagaacaattctaatactttcatacctgacaactggggaaaatgtttcaaaataatctaaaccataaacttgcctaaaaccttgagcaactaatctagctttgtaagtaggtggtgatgttgaatctttaatagtgaaaacccagcgacaaccaatagcacgacgaccagcaggaagaggaaccaaagaccaagtagtattcaattgatgagcatctaattcagtttggatagcagataaccaaaaggatctctgatgtgaattaacagcctgattaaaagtagttggtaaagcagatgaaacagtagtagatgcagaaaaagcagtatgaatggcattggaacctaaaaataatgctttggaacgcttaggaactgaatcaacaatattagagagctgagacaaggacctttgcattggaacaatagcaggtggttgagctggagcaagtgctggtgatgaagtggtagatgatggtgtagtagatgatgtagatgatgatgtagatgatgaagccagtgtttctggtttgaaacatggcttttgcagtggaggttgagtaatagattctgaagtggtatcacttctgtaacgacgtaatggaagtaaagatggttcaatcggaacttgatgaacttcatcataaactggataagcaaagtcattaggaatagaatcaatttcttcttcatcaccagatgaaactaatttgtcttcatcaggaaaaaatttggaaacatcattatcttcttgtgaaataatattatcaatagcatcagaaattggaacagaggcaacagtttcaggaacactaggagagttaggaaccatttcagtattatctggagcaacaccagaagattgcatcataggtgaagaagaagcagaaactggagcagatgatgatgatgatgatgatgatgagcttgataatgaagctggggatgatggtgatgatgaagtagttgaatgagcatccgaagtggatgaggaagaaggtgctggtgaggaaggtgctggggattgaaccggtgaatgattaataataaggggttcagcagaattagaagcaccagatggaataacaggaacaccaccagcattaccaccatagaaaatatctgaaggagaaacgtcctccataataggaatatcgtttttagagtctaacattggaaaataggaatcatcaaatttgacattatttgaaacaacaacatcttgaatcctaggaataaaaaccctataggctttatgtgctggactatatccaacaaaaataccagcgactgagaccggtgaaaaaatgttttccctcttttcctttggaattaataccatgcatttgcaaccaaaagaatgaaaaattgaataattaggaaccctgcccatccataattcgtaagcagtcttaccattgagaacatcagatggatatctattgataataaactcagcagttttaacagcttcagaccaaaaattaaattgtaaaccagattcagaaaggagagttcttgctttttcttgaacagtacgatgttttctttcagcaacaccattttgagatgaattgtatggaacagtaagttgatgagtaatacctttatcttgtaaatagtgttttaaatcattgttacaaaattcagtaccattatctgttctaataatactaaccttaaaacctttggatgagaactgagtttcagaaaagttgatgaattgcttaataacagaaggagctgcagatttggttgctagaggaaaaattgaacaccatctggaataatcatcaacaattgttaaaaaatatctttcaccagataaaccaggaacattaataggaccacaaacatctgaatgaatcaattgaagaggatgagttgctttaaaagtagatgattttggtagaaccttagtcattttaccagcagaacagtgttcacaaattttaacatcagaggaaggagtataacccaattccctcataaccctaccagatgggtgacccaatctggaatgcatgttcaaagtatttgcaattaaacaataattttcagagataattggtaagaaaataaattgatacaaagtatttgaaaaatacttaccaataactgagccatcttgcatataacaataaccttcatcaaaataaattcttgaaccagttttcctagtaattgcttcaatggaaatcaaatttctggaagtatttggaacataagcaacattactgattgaaattctttggccattattaccattaaaaatgacagtgcctctacccataatttgtaaattatcaccagaaataccagaaacagtttcaacagaagtagcagaaacataatcactaaaatgttcaaaattcttagtcatatgaagattagcaccagaatcaagagtataagtgtcaccagcatgaacaattggttgagaaacatgccaagcaacatcattagtagaaacttcagaattattaatattgttagttggcttagtggaaataggaacagcagcagtacaatttggagaaatatgaccagattgttgacatcttctgcaaataacatcttttgaagtctttgattttctgtttctagatttaggcttgttagcaataaaagcttgagcagaaggagcaccattggaagatgaggaggtagcaatatccttaagagatgcttcaatagctgataaactaatttggggatcagcagcatctaaaattcttgaattgaccgaaggatcacgaaacatttgtaggtataaaagacctaacaggtgatcaatagtcatgccatgagtaaattgagatctcatggtctttaaaaataataatcctttgtcaagtggcatagaggatgatttagttaatttgtcaaccattgaataaagttgacgagcagacaatctagaataatctcttctaattgctgctaataaggcagaaccagacaagccttcacattgatagttggaaataatattaccatcaacggtattaaaaaggacaacttgaagggcccggttaagataaaatgttaattgaacaacactggggtcatcagccggagtatccggtgaaactaataaatcaccgtcagtaaaaaattccaataaaccggacccaaaagtagctaaaatggagcggacaccaacatcccaattgtaataattttcagcagatttcaaagtattaatagatgactttggacacaagtgagagaatgaactcataacctgttgtgtgagggtaattctatttgtaaaatccattgtctgttcccttatatagtaatgaaaaatgaaactttgaggcattttaattgaggctaagttgaggcatttaattgaggcttagaaattatgtttagattaaacctctcaacaatttatatgtctgaacacacttttcagcaactttcgactgagaatatttctactttggaaatgaaaaaatggtaagaccaaaaggtttcttttcgtaaccttaattcaatgttagtatgaattagttctgatttaataaataaaatacaaacttacgtttgcgccatttgtgtcttctaaagaaagagctggaaagggaaaagagttacagaattgaaacactaatgagttcgggtttaggttattcatgttgaaaacaaagacattacgtaatatctttaatttctttattctctacatgtgaataactaacgacgatatatcgattgttgaatgtttgcgtgcaatgttagaacctcagaggttgcaagtacttcttctaatattaaaatatttaaacaaagatatatagtaaactattgctcggtcgcaaatctgaagacattattgaactcgggatgtttatctgcaatgatattatcatattcttctaaaacatgaataccaaatacttcaacattattatccaacttcctccattcgaattcagtatcagaatcaagcattctagaatataaaacaaattctaactttcctgaataagcctctatccaatcgtgctcaatatttactctttggaatttcattaacaatttagaacgattgttcacctcaacatggattagtctttcaaccttgacatattgccaggagttctcttgaatttggcatatcttgttgcaccctctttgcttatgaatgtattttgagaacaaaaatgtctctgttctctcaaaacaaccacatcatcttcagaaatttctccttttgcatataattctgaaagaggcatttccaaatcactatccctcaaaatctttcaacactttggaatatgataacaactcattggatcattcttatatttatttataaatggatttgcaattatcaattgctaagaaaggcatttgattttgagtggttttgaaactgtttttatgaggactaagctttttcctgactgttcagcagcatctttcagtaaaaaaacaccaacaatctctaaaagaaccaaccgatttccacatatcaaacatatgaatcatttgatgagtaggtacactaaaaaaattactaaatattggtttatattcaggaatttcaaataatcgttccaaatttaaaatcaattttatgtaacttcttttcatttcatttcttccatcattatcaacaaaagacaatggaacattggtagccaccaaacaataacataagcattcaactcgatcatatttttaactaaaaactgaaaaggagtaagtggatgattagccttgagttcttcagcaagtggcaaaaagtataatgggaaaatatgggaaaaagcctttacatcaacagctttaactctactagcagtcatatcttttgttaaatagattttgatatccttttattcctcaataaattttacagttcccaaaaaaacatcaataccttttttatgttcaataatttgtttataagagacaggatctagagccttgaatacagcagaaaccaatatacttaccaccctcttagttataaaattttcataagcagtatgcattaaatcagggcaaacttttttgaagaaatctgggagatttagatacgaaatcaaggattttgccttaaccctccattgtgtcctattaatacgccctaaagactctcgcatacgtgacaaatatgtttcagttgtaactaataagtcactaaataccttttcagcatcatcgacatctatttcttgaatctcatcaaaaaaattataaacatttacctcattattatcatcattattaatcccatttctgtttctacgcattgctgcaacaataggagtaaaaagaattttattatctgtcgtcctatgaatttcacaaaaagtgcatggaaaattggagcttgggccaagtgtttccgttgaagcagccaatgccttcaaatcagcagaaaatggtaataaattttacttttatagtaatttcttccccattttcaataaacttgaaacctttttctgaaagttgatttatttcttcaattagaggtctgcaaataatacccgtataaccagcagcatcagtttttgttaatattacttctgggatatggataaagttatttttgtatcttatcatctctggtaaatccataatcatgacacagttgaccttgacacctttataagtctttacctgcaaattacaatcatcattagaaacatgaatgttaaatgtaaattcatttggattgttactactagcttcaaaaaatctacgcattctatcagattaataaacagtagcaattgtatcggtatttgtagaccatttctccctttcatcttttatatgctgtctaatttctttatttttgaagagtgaataaagaactggagtaatacatttatatttataggattctgcatcatcagatcatttatgaacctcattaatgttgtaatctgattactctagatgcagcgtccattattaacaacagtaaaagttatttaaataaactaaataaaatataaataaatataaaataaataagaaaaaacaacataaaagtaatattaacaaaccttgaaattcttcgttttatctatactaagaattccaacgttgactaataatttcttttcctgatttgcgagcaacactaaattttgattggttcttcgaggttcaacttaataatacaatattacaacttaataatacaatattatagtttattattcagtctcacttagaattaacaatctcaacaatctcaacaattaacccacctactatctaccctaatttgtacagtatgttcttgagtatctttattttcaaaaaagtaaagatgttttgaacattttttacaaaattgtgaatatccttacatggtacctattttatgccattcttttcaaactctttcatttaaacgtcttatttctagatctttatcatcaattaaaccaaataaagccataaaactcaaaacaatgttagccttattcatggaaataaaatgccttgaagccatccaataaataacaaaggaacaggcagttctaaagagatcccagaatttatgatgcataaaatcatcaaattgttcagcatcaaaatttggtttttgatattcccaagaattttcatcaactacttcctcttcaatatcattatttgaaaggttttctggttgaacatcttgattgttttccccttcatcttaactactttcatcagaataatcagattcatcgtcgtcaggcattatttctgaagcatcatgaaaaaactaccatcatcatcatcatcatcatcatcatcaccttcgttaccactatcttcagaagagctagaattaccagaatcaaaaccatttgaacgtaacacattattaacttgagtattaacttgatcattgatattattaggaattggaaacccatctgtaaggaatgaatcaaaagcatcagaaaaaacctcgccatcattgatattatcaggaaatgatagcccatcatcaaaagcatgagaaaaagaacctcatgatcattaatattattaaaatttgaatgattattatctaccgacattccagaaaaagtatcatcaccagaagaactcccaaaatcactagttaaaacgtaatcagtttcgtatgcgtcacaattgtttatttcaattgatggtgaatctattatatcattgtaatcccatcctttttcattaaaataacatttaaaaatttcattcaatgtatctgcaatatcttgatctctctttgtatttcatgaaattgtatgatgattctttaattttttccaaatcttcaaatttacgtcttcttcttgcactagctctcagtgtggttaagaacttaatattcaaaccgtatagatttaagagtcccactaaagaacctctattagttagttttgcatttttgaattgtttaaaaatgaacttagcttttcttttattgatattcgcagacccatatttattttcaagagtcacaatatcatcattgatatcttgttgaacaattatatcaatagctttattatattgaataccaccatacgtgtgttaccctgatctctcgttataaaagaaattgatgtttgaagttgtacttgttgcaaaactctttaaatttctttcactcaaagcatcccctttttcttcctgataagatttgatatttttgtatcgaatattttttacgttcttaatagtaaaagaaaatacacatggtatatctgtttccagtatcgttggtactttttcccataaaaaaaaagaaacacaggcgtatcgtctctgtaactcatcgagatttttaaataagaattacgtaacaagccaccatgattacgtaataaaatttaaaatttaaagttaaatgattagttaggatcccccagtctcggagagcccaaatataccggtgagacccttcaaaacttacacattgttaaaatacaaaaagaaacatacgattacgcttttgtcagggatgatataaatatagaatttaattacgtaagatatattacgtaagtaaatgatatattgatagtaataatatcataatataggtaacggggcaactcgttacatgagatatgtataagaggccaaattcccacaggatataatatgtggaaataactaatagttatgtaattcttttatatagattcttatagagctatagagaaatcatcctttagtatatcttattattagattattacgtaattgtcatattcgcagaagtaacaaatataacagatttttagccccaaaatcgaacaaatttgaattataatggttgcagccccaccaaaatgcgggttttgaaaattttactatgtaaaaaagtcacaaaatttcccacggtgtataagttaagaaagaaaaacaattagtaagttaaagaacagttaagaggaagtggaaatttctctttatatagacaaatttatgtctaagataattagtgttttgattaataatcaaatgtttcatgtttgtattgatcataatatgagacattcgtaatcacaagtattaccaatatcatatgtctaaacttatttataaatagatgaaacataggtgaaacacatctatttatagcaacaatgaaacatttgtatctcaacattaccttttaacaaatctatctatagttacaatgaaacatttaaatctcaacaagcagttatcagctacaactagcttacgtaatcataaaatataaaacagggattagtagcagccgggctaaaactgagaatgaacggtcggtaatttaataaggaactacttgttaaaataaaatataaaataatataaaataaaagaaaagaaataagtataataataagtaaataattaataattgtaatttggaggataagtaataagagaggttggcattattgaagtcgagaatgaattaggataattctgattggttggttacaaccaattaacaaaagaggaaactcttgtgaaattgaagagttaatattttttttttttccagtcaacttttgtattgatataaatttataaaagatactataaatatttttctctaaaataaatgctatataataaaacattcagtccggttaagggaaaggaaaatcctataaaacccttttgttatattgtaaaattaaatgaaaaatgaaaaatttttttttttttttacattaatttcattaaaatatacaattttatacagattgattacttatacgcatatattattcatgcttcatcaattcaatatatcttcatatactgaactaaatgtaaattatttctgtttgattattctcaatctttttcatctaatttagatctaataagaactaaatttttcatatttgaatagcaaatatgtatctttaatatatctttttgttatcctaaactctggatcattcttattgcttttgtagcattgtttgttaaaaaatataattaacttgattattatatttgctttataagcatctttctttgttgatattaaaccaacaatattctttagatcaatttttatctctaattcttttagaattatttcaattcctttacagttgaaaaagacatgatgagtcccaccttccccttcgcagaattggcaagggtgataaaaatgggaattcaacattcctgtttgtaattcaaataattcattaaaatcaacatggttttgattggtgattctacccaaccaagcaaagcatgtttcccaatccagttgatggtctagtttgccatcccaataatcagcattaaatttatttttaaattcttctttgtaaaatcttttagaaaagtgtttaaatgattcaacattgatttcctgatttttattgaaaatttctacaattttccatttttgaacatttttttctaccattgaaaataacgatgttgcattgaaatctgtagtttctttaacctgaaaatctgagtgaatattagttaaataataccatccttgtaaatatgggaaaatattagagtacaccattaatggtgctaatgtttttgaagaagcttcatccatgttgtaattcacagggtgttcgataatgaaattgatatttggttcaagatcgattattattttccctgtatttacatttattattttaggttttgcaacctttgacatttcatttgaaagagtttcttcaatagtaatattacttccccatattttatgatttttatgcagaagaagactgaacggatatgttgaaatcaatccattttaaatagtgcctggtatttttatttttggtaaagttccaggtacagctctatttgatagtatgtaattttcaacatatttgtaataacaatgataaacgtagtgatttctgatcataacattaataattccttgtaatgagtgtgagattattaatgtcaaaggatgttcatttataaattttaacttctgtttaatagtcgttatataaatgaaatatgctcttctaccttgaagttgtttaccaaggtcgatcagacccatattgaagttgtttaccaaggtcgatcagacccatacccccatttttgtgaggttgatgccatttgattcttctaactgcaattttcagcggtaaatatttaactaattcttttttaacataattttcaaaagaatttaaaagaggatccggaattggatcatgttgatcaaaataatagatagtggaataaatgtaagtattaacagctactactctttgatataaatttagatctaaaaacatagttttccttagtcttgttttcaattggtttattttattgtaccagttaattttcaacaagggaattcctagatagataggattttctttgatatctaaaattgatagcttcaattgatttatattagcaaattgtttgatattattgatacctttattattaataaaaattattgatttcttttcatttattttaagatccgaaatttgagcaaaattatttaaaattgatagcgattttaatagttcattattgttctggtgaaacagacatatatcatcagcaaaagctagaatattgataaaaagcttagcatttaaacctctctcattgtatggattgtatttcattcctctaattgattgatggagtttaataatcagtggttgtattgcaagattgaatatcaggggtgagaaaggtaaaccttgtcttacacctctccttaatggaatattaaatttatggatccaattttgattaactatattagccgatgctaacctagattggttaatagttgcttcaatagttgaattagggaacccaaatttttctaagatctttttaagatattgatgatcaatagaatcgaaagcttttttcaagtctactaataatatatgttgttcattggataatgatggtgatgaattgatttgattagcaagaatccttgcagtttcaatatgtaaatgaatatttctgtgaagcataaatgcttgttgatgatgggaaataatcctgtttgcaataggcattattctattagaaatagaaaagttgattaatctaagtgatgaatttgtaagactgataggacgtagatcatctattaatggaagatcttgtcggtaactctttttgggaattaattttatcaatactttaccaatcttatcagttgtggttaaattgccttgaagaatataatttgccatgttggttagaatcacagcagcagaaacccagttgtttttccaatctctgtaagtaataccatcagtccctggtgatgatggaccattttcatttagccttagaaggtttttatatatctcttgttttgaaaaaggtttaattaaatcatttttctctttctcagttaattgttctttaatattttcagtgaacttgtcaaatttgttatttaaattttgatttgaataaatttcatttgatgcgaaaagatttgaataaaatgaatttgcatcatttataatattttcatccaaatttgcttcatttgaatgttttccaaatctaagtctaagtctcttgaagttttttgagagattagctgagatattattgaattgaggatcattaaaatcaaatcctaattctttagatgatattttttccttatatgaaggtaaatgtttcattatctgaattactttatttgttttccagcaaactctttgcatatatgcattataatccattgatgggtttttagtatccagaatctcattggtgaaaatgtatttatataattgtttattttcaataatgtaatcaggaattgatggtattcttttgtaaaaattatctttattaattatattattattagaatttgaattgatatctgataatgtacatactaccggtctatgtgttgtaaacggtagcttttgatgtactctatatttaaaattgatatttcttagcagattgaaggaaacatggaaacggtctagccgattatttgttccatttgaaccgtggttggtgtaacgtatacttcttctattatttggaaggaagaaaatatcatataaattattttccattaattgttgatgaagaaatgattcaatacgatttaaatttgttgcttccataggatgtgtattccaatcaccacaaatgattagattattttcaccacgagataatgatgataaagttggacataatgtgtcaataaaatcttttttgttaatgcagtggaatctgttatcattaacattattgtaaactggtacataaacagagatgatagttaagttttcttgtttgaaatttattgttatatcacagacataaaagtttgcaagttgattatcacgattatgccttggaaaaatattatttgaaatgatttctattgaagaatggtaaataattgctgttcgatgttgaacagattgaatcgcaattttgaaatcgaaattggataataattgttgaattgaagataattcagttgattgatttagatcaaattctgtaagacacataatttgaatttttttattttttgcataatttagaatatgaattaatttagaaggactagttgccttctgaatattaaaatttaaaatttttaacttattcattatgatattttatatttttttttaatttttatatttttatattttattaaacttgaagaattaaatgaattagacttgtgagtctaaatccatttgagatttctttttttcaagtttctcttttctttctaatgccatttctatttttttagcatctaataatgtaccagttgctacactcttaccttgtttagaagatttaactaatgttctgacatttctaggttgagttggagtttttggcatacttcttgtagtttcggcatgcttagtttcaacaaccatatcttctatctcttcatcactatggatgttttcatcttcatttggaatttctggatcatccacattttccaatacttggaaaggattgaccgcattatcaacgttattgactattgatgatgatgaatctgacctagataagttcttaggtttagatggaatagagaagccatctgaatctactttgtcattattgataacaacagctgcatctagatttaaaatgtttgtagaggtttgggctctacttcttttcccattaccatttgtagttgatgttcttggagtaacaggagcgtaaaatacttgatcattaaccgttgcgtttctaattctcaatgcccacattggtaatgatcttgagagagtttttttgaagaaattctctcttgtttttgggtggagggaattaaataacctttcttgttcagcctccgatgattttggacagaaaatttctctgtgaccattctttggaatttcaccttctttgaccttatgtctagggttgtaacatcttctacaacttggtttcattggacatctagctgtagtgtggtctgtacatctgcagtatacacaatgtgtaggtgcagtagacaagtaagtgatgatggggattttatgtgtttttccacctgttgtgtgtgagatggaatgaattttaggtggtaaaactgatgattttagttttaacactgtgtaaataattttattttgttcgtagaacttcatattgaatgccattttggattctttttcttgtggtaattgacaagacataatttctccgtattctgaatagagatttttaataatttcatcatatttagatttaatgatgaaaggagggaactccgtttttaaaacaacaagtgtgttgttttcttcaaaagattgatccattaagttaagatcatatgaattaaatgtttctactaacatggtagaaactaattgtaataattccatcggtggttcagccaatggtaggttaatttttaaactgtatttatcagtattaaacatgtttgcaccttcttccattgtattctcagttggtgcatcaattggtttgctcatattattatgaactttgttgatttttttatttttaataatattattgttgttgttatctttgcttttgtaataatcttcaaagataaattgaaactctttgtgcatttctgctaaatttgtagtattaatatttctttctaattcttttaagaaagaggataaaatttcttgtaatttttcaaggtctaaaaattgatctttgccaacttttagaaagtatgaaaggtgataaagatgatctttatcaaccgtaatatttgcctccgtaattgttttatggagtttttgagccaacgtcatggttggttgaggttctgcatttacctcttggactacttcatcttcctcagcgcaatcttgaaattcaatatcttcatcttcgtcttgagtttcatggtcagtttggttcaaaccttcgttttctttttcttcagcaaagactgaaggtaacttgttgaactcaccatggggtaagttgggcggtttagtaacgttttgagggtcgggaggacctgaatcgtcgattgtagtagcttttagggcccctttttcaatcatttttttttttttttttatttttatttttttatttttatttttatttttattttttatttttgttttgttttatatttcttaattaggaaagaggggagccggcgaagtcgttcatttacaaaaacataacaagcgcaagtggtttagtggtaaaattcaacgttgccatcgttgagcccctggttcgattcctggcttgcgcaggtttgttttatatccgagatagtttagtggctagaatttccgcttgtcacgcgggagaccggggttcaattccccgtctcggagtttttttatctttcttatctttttctgtttcaaataataataataagagaaattttagagattcatgtaaaatttaccataaaataatttttttagccattttctatattatatacagctttctcaataacggttgattgaacaaagtaaagtccaatggttcaaattacagataagtatcatattccaaaaacatacgaagaggcccttagaacaccacaggaggaagaatggagggaggccgtattagaggaacttaatttaatgaacaggaaacatgtttatacattagttaataaatcaaaagttccaagaaaaaaaattgttaaaagtaaatggttgttcagtgtagagttagattctgagacaggagaagatgtattcaaggcaagaataatggcaaagggattcacacaaaggaaaggtattaattatggagagacatcagcaccgactgcaacatatgaaactgtaaggttggttcttagcttgtctgccatgatgaattgggatattttacaagtagaggctacagatgcatttttaaatgctaaatcacaatatgatatttatttggaaccaccagatgcaacaaccggagatagtaatatagtttggaaactaaatagaactgtgtatggtttgaaacaatcagcaagaggatggtatttcacagttagagattttttaaagaataatggattcaaaaattcagctgtggaaccatgtttattttggaaaaaaggagtgatgttgatattatacgtagacgagtttttaatttgcggaaaaaataaatcaattaaagaaactctacagctgttaggaaaagacttcgaaatgaagattataggatacccaaacaattttctaggaattaatatcaggaaaactgataatggtataattttaacatctgaagatcaaattgatagaatggtaaaagaatttgatttttcttttagtggaagaaggttggatactccattggcaaaaggttttgagaaaaaggaagataattctccaccattaaataaaaaagagcattcaatatatagatcacttattggaaagttactatttttggccaatagtgtaagagtagatattgcatttgctgtttcttatttgtcaaggtttttggaaaatccaactacatatagaatgaaaggtgctaaaagactttttcagtatgttgttcaaactagattcttcggattacattatcataataacatacctgtggaaataaactacgacgaattcaggtttgttgatgagagaggcgatgtgtttgtaagaccttatcctaaagaaggtaaaattgatttggtttgtctcacaagttcaaattgggtcggagatattagtgataagaaatcacaatttggtcatatgattttaataaatggaaatataatcaattggcagtctaaaagacaaagacatagaggatcaagtagtgaatgtgaatatatagttttgtctgaggggttaactgatgctcttgtttatagggatgttttaaaagaactatcattgagtgtttcatttatcaatatggtctgtgaacaccaatctgctcgtgcattgtatggacctgattcacaaaataaaagagtaaaggacattgatgtcaaataccattttgttataagttatttggatcaggaaaaggcggccaaattgaatcatatttattcagatgaaaatattgcctatatgttaacgaaaacattagatgtacctacgcatatggaatggtcagatatgatttacaattaaaagtttttatagattattgaatctgtagagaataaaaatagtgacattattaataaaaatgacatatatattagtacacattggctctcttttttcttgaattgctaaaacaatttattgataaacatttatttaaaatcatatgtattcgaaattgtgtatatgttaaaataacgatttgcaaaagcccctgaattgtataagttttttacactaaattttatacaaatctatacagcttggccaaataaaagatttttttcaatacagaagagtttaaagtaaattttcaaaattatagttttttgtagtcttttgatcagtttagattctactttttgtatttgaataaaaatatacctctttatttattctaggttttattctgaattttaaatcaagtttcttatatttgaagcattgtttgttaaaaagtataactagtttgattattaaattaactgccgtatatgctttctcttttgaatctgcaaaatcaattagagtttttgaattaatttccatgttaaaaatgtctcagaatatctttacaatcaaaaaagacatgttatgttcatcttctactttccaaagttggcagatgtgataaaactgagaatctatcgaaaagtatacattgtaattgacatttttgatgattgctgattatattggatcaaccaaaaaattattcaaaagccatttgaccttcaattttgacacaaaagtaattgaaacttgaaaaaagtacctttaattttttcttaattactaatgataaaaaatttttaacaccatatattgtctctattacaataatggccaaattaataaaatgcagagttattcttcttgcttttgtagcattgcttgttgaaaaacataaaattttgattattgtacttgccacataggctttttcctttgggaatactgaacaaacaatattctttggatcaatttctattactaacttatttaaaattcttttaattcctttacaattgaaaaaaacgtgataactccattttcacctttcaaaaatctagcctttttgctatgagaacaaaatttattcttctattttttttacattaatttcattaaaaaatacaattttatacagattgattatgttgtaatctaataactctagatgcagggtctattctatgacaacagtaaaagttatttaaaggaactaaataaaatttaaataaaaaattaaatacaaaactaactaaagaactttttaaaaggaactttactaaaccttggaattcttcgttgtatttttactaagaattccaatctttactatcgtttcttttttctaatttgtattgtttctttttatgatttataacgtttctttttctgatttgcgaacaatacttaactctaaccagtttttaaggctcaacttaataatacaatattattatgtattgttgagtttcgcttagaattaccgatctcaaaagattagttatacgcatatattctttgaccagatgtccctttttttactgtatactcagtgactaatgtctcatacattttattacgtaatcatacaagcatgagtattttgaacaaaaggtttaattaaacaataattggagggatggccgagtggtctaaggcggcagacttaagatctgttgggcgattgtccgcgcgagttcgaacctcgcttccttcatataattttttttattagagtattatttttgttcaaacgataatctttggttgaaagctaatatctatttcaaaagttgagtggttagatataggtataatctagtatttttaatggaatcaatcttattttcatttgaacctagcaaaaaagaggattatcgccaagatatatacaggctttgtttagtgctaatccacgtacattcaagccattaacaggttgattttctggaatcaggtttagtacatatgaagaatcccaaatatccatttttaagatagaggcaatagaatgaaacattaatattgtaagtatacttacagaatgcctttgaaaattgtcaagtagttcagaaataagttgaaatttaaactaaatatcaaagcttttattctaaacttaatttcagaactagaactttaatgaatcgtgaatattaattatgtttgaatattagcaaaagagaagaatatctaaacaatatgaaaaaattacttgtattcgaaagccaagtgattaccttttatagttagtattttgtagggtgtgtcataggtatgggtaagagcagtaacaattagagctatttgtaccatcgaaatggaaagaaagaaagttggagatctagaagcacctttaaattattccaactaagtgaacaatttaatctattcaacgatatcctaaaacattagaaatgataatgcatcattttaatggtgaaaaggtggattttacttgttctaatggtgctcctgaaattaaaggtttacatgatatagatgaatgtatcgaagctcagttaattcttcttcccattaattaaattaggacgtttggcatatctgctaccgctcaagacaaaataagaaaccaacaattaaatttaacaatgtttcaaatgataaaaatcaaaaaatgaatcctggagaataatttgatatgtaccagctttgtgtctaattcatcgtttacaacatcacacaagacagtagacggaaatctcatgatacagtaaagatgtattgaatgcaaaatgtaaatagtttgggcttaattgagcttggtatatcaattagcctaaacaattgtacaaatggcaatactactctattaatgagtgtcctttaattcgtacttacacaaagattacgtaattataaaatataaaacacggattagtaaaagccgagcaaaagcataacaagcgcaagtggtttagtggtaaaattcaacgttgccatcgttgagcccctggttcgattcctggcttgcgcaggttttgttttatccgagatagtttagtggctagaatttccgcttgtcacgcgggagaccggggttcaattccccgtctcggagtcttttttattaacttgttttcttgctttcaattactacaatcgttgaacaatgttgactagttgttatattaatcgatagttttaattattctatattataaattacacaatttttttaaaaaagaaaactttttgaagagttaataagatcattttcctttttgagttcttttaatatattttcatctttaatatttaaagataataattcatcatttgatattaacagttccgatcctgttaaattgaattttgtattttgttcttccatgtataggataacttttttagcaacttcctttaaatcatcccttaatgccaatcttctaaataaaagtttcatccaaactctctttttcttataattaatttcatcattagaatttgaaataattatatcattatttccattttcaaaactttcgaatgtgttaattaactcaattaattcaatgtatatttttgatgtaaattctacaatggcagaatttggacgttgtttagtttctttatttttaatttccttatcttcatcatcatgatcatcatcatgatcatcatttgaattacttgtaaagtccacattttttatttcaaaagatgacaaagaaatgaaattaatcaaatccgttaaagatactgacttattaacaatgatattattccatattcttttcacatcttctatgaaataagataaattattattcaccatataatctgattcccataggaaatgttcatttccattagtagaagaaaatcctaaatttaataaagtgttgaaaattgaactttgtattgaatttaaagttaaaatattgttgaactgtttaaaattctcattattaccaaatgcaacaagattagataatttaccaatacttgcttgtaaatttctatcaacaatattttcatccacactgttatttaaataattagctaattttgtagaagcggtagagaattgtcttatctttatatcataaatccaaccaaatttattataattaatatcagttgataaaaatttttcaaggtattcagaatatctatcaaaacaagtcatcatgatattaatcttatcattttgaatataatatttgaaaagagattctgcaaattcatattgataaatattcatataattatcaaattcattatcaacatcagtaatataatttgcatattcaatatcagtaaattcattttgctcatataaattttgaaccatttctctcttactttctaataatgatgataaactttgaaggtcattatattttgttactaatggaattatatctgattgtttattaagtatgatgaaaatgaaaatccatttatctttatttttcaataataattcagatgaacgagttgaatcatttttgttaattttagaaaattcaacaatttcattagttgtgtaatataggaaacatgataaacctaataaaatttcattatacttatcagtaatttcaatttcagataaaccatcttgtaaagaataaatattttgtgtaacggaattaatatcaattataaattggaaatgatcaatgaaaatagtggagaatttatcggaaccaatactattttttatttcatcatcaattttgacaaatgcatctataacaagatatctcattattgaagaaagttcaattatttgttcattacttccatttttaagaacatgagaacaataatttgcaattaggattactatttcctttgttttatcttgtaagaaagtttcaaatgaggatgaatagtgcatttcctttaagattgatttcaattcattttcaagactattatttgcaattaattcatagaatttagcacttaatgagataagttcacatgcatttaaaagtttagtactcatttcattatcatttgaaatattgtagtttaatgaggcataattcaataaatttttaatacattgaaatctattttgtaaattttgttcaatgaagatttgtgaagtaattataaatttagatttattttctaagagatcatctaatatatcatttaatgcaattttaatttctgattcagagaatgaattatcagttttctttaaattataatcaactaaggcattagtagaatttgaaaattgtaagaattggtttatatgattttttaaatagaaaccattatccaagttatcaccaactgtatttattttcaatgtgaaaactcccttattgcaagatagataaaataaactttcattaaaattatcttgaacaaatgagaaaacatttaaatcatcatttaataaaataacttcataccaacaatttctaacttcaagattcttacgtgttaagatgattttattatcattcttaataacgaatgcatctaatttatcaattgaaaataattttgattgaaagtaagtagtattaagttcattactggcattatcaagaatagatggaatatgatttctatgaagtaaatatattgaattattatttgaattaatgtctaattgatatctataatttttaaaagatttttcatcaatattgaatattaaaacatcgagataattgtttaataatgaaagttcacaatcaataaaattcaattgatccccattagaatcaattgaatctaaatcaaatgaattattaattgtaaaagttgaactaccctttaaatgatttaagaaagtaattttaccattagattctaaaactaataaaattttcaaaactggtgatacattaaaaattttcattgaaatgatacgatttgaattttcatattctctaatactataagatttagataaaattgaacttataattggtctattattataaatttgatttgaattaattgataaaccaccaaatttatccttaactgaaatatgaataattctcttttgagatgttaaaatgatgaaactatcattatcgaaaaatttaatttcagttaaaaattctgcattgtaaatttgaattttatcaattaatttattttgtaagatacttaatgaaggtgataatttaattgattcaaaatattgtaaattacctgataatggatcaattataattaaatcaggttttaaaggttttaaaggatttggaataatagtacacaagggtaataaaccatattgattaattttataatcatattcaaatgcatagatattattttcattattaattgtactattttggaaatcaaatactaaaattcttaaatttgaaattaaaattgcaattgaatcagtggcaacttttaaggataatattttttcattttcaattaatttaggcaatgcattaattttgacagaactaagactataatgagagttatttagtacagtttgacattgtgaattatcattgtctatatcaatatcaacattgacattgtcattaacattaacattaatatccttaactgaatcattggaagatggtgtttgaataccattaccaaacctagtagcagtgaacgtaaagttatccattctcccctacttttctacccactaaagaagctattctaccactaaaccagtcaacaaataagtaaataagtaaaaatggtatattaacattaataaacatgttacgtaacttattttttcccacaaaaatttttttttttcattttcattttcatgaaatttttttactttactttactttactttactttaatacttcatttcttagtaacaatagaccaattaccaatatgattagatcaactaaacccaagaccgctcgttccaagagagcagttgaaaagaaagagagtaaaattgttgaaaatactaaaactgcacttttcattccaggtaataattcaaataaagcattacatgatataacaattgatttaagttcattaaagaaacctttcattaaacgttttacaaagaaaaataatatattaccatttgaagatacaacaagtttagaatttttaagtgaaaaaaatgatgcatcattattaattttatcaacaaataataagaaaagaccaaataatttaacatttattagaacttttgattataaaatttatgatatgattgaattacaagttttaaatgattttaaattatttcaagattttaaaaaaatgactttccaagttggtttaaaacctttatttacatttcaaggtcatatttttgatattaatccaacttttattcaaattaaatcattatttttagatatgtttcatggtgaacaatctaatttacaagatgttgcaggtttacaatatgttatatcagtttctgcaattgaagaagatgataatgatgttttaatatctaaattaccattaatttattttagaatatataaattgaaaactttaaaatcaaatgaaccaaaattagctagaattgaacttgaagaaactggtccaagattaaattttaaaataggtagaattcatcatgttgatcctgaaatggagaaagaagcattgaaaattccaaaacaattacaatcaaaggaaaggaaaaatattcaaactgattcacttggtgatcaagttgctaaaattcatgttggtactcaagatttaagtagattacaaactagaaagatgaaaggtttaaaaagtagatatgatcaagtaaattctgatgatgaaaatgatgaaattgataatgatgaagatgatgaagaagaatttgttgatgctataagtggaaatgaagatgaagaagaggacaaacctgcaataaagaagagaaaattataatttattcaaactcttacatttacacttatatctatcactttttacgtataggtatataattttttactaaatattatttaattaaatttgtagctaatagaatttttcagtataaacacttgaaccatcagttggatctttaacatctgttaaaaatgatgaaactggatttggtcccttaaagaaacaatatttctctaataaatctttataactttcagattcaatactattatccccattaccaattaattgattattatcaatacctttaggtgtactatcctttgaattaatgaaaacttcccttaaattttgtttcccattattattttcattaatattattattttcattaattttattatcttgtaatgtactattaccactaatagtatcatattcttgatagtattgattattcttatcatcgggtatatttatatttaaacttggtatattatctttagtatccgttaaacttatagatgttggattcttatcaccattattatccttaattaaaaatttaggtgatgatatcattgctttaatattattacgcatatcaaaacttcttgatcttttaattttaacattagaattgttgattgatttagggaaataagaattatcttctttcttagtttgatttttatagttatttataattaaattttcttttgattttgatggagttggtgaacttagatattgttcggtattattattattattattattattattattattatcattatttaacatttttgtattgaaaaattttaatgtataatttttcctattattattatcccaataatcttgaccattacatgaaaatttaacacaaaaattaattattggattaatattaaaacttgtaggatttgatttaaaatatgatgttaataaaattggagttgataattggaaaataaaacgatcataacctgcctttttcagtactcttggtatatctgaagtatattttgcaattacattaataatagttttccaattatcaacagtatatctaattttaacagattttgtaaaacttaaatttttaacagctatttgtccaataattgaagttttatctaaatttaagaaaactctttcaaggaaaacaggtacttcacaatcaattttatcacgataagaaattgtttgaaaatcagataaatctaaattccaatttttaattgcatttttaaatttttctaatttccttggattttcactttcaatatattttttacatgatttaaataatttatcatgataataatttgaatctaagacaacattattagtaaatccaaaataattaatattattagatctaattgtatcatcatcatcatcatactcatcatactcatcatcactatccgatcttaatttgatattttcatcactataataatcatcatcatcctcatcgtgcagttgttcagtttctgaattaaatggagaattatcggcactaattgaatttggtttatctttttccttaaaatatttaacattaatattattaccaaaatgaacttgtttataagttggagttgttggcattgatacagcacctgatgatttaaatgaactatttaattttaatgaagatttaaccaattcacctgattttttcctaactaatggataatgataattattttcattatcgatattattagtaatattatttgatgaatttataccagaaattgaaactaatggagaaacaggagattcaggagattcaatagttgtatcaatatttgaattattataattataattatcaaattttttagaatttatcagagtattttgtttaattattttttgaatatcaatacctgaatccatacttgaactccttgaaggttttttcaaaaatgaaagtgataatggtaaactatcatcatctgaaattgaattaaatttattatatccaatctttgtattgttattatcctttcccaatgttagattagtatttttagttaaacaatttttactctcattatcatcattatcaattgaattatccaattgattattattttgataatcaatatttaaatctgacagttgtctaccaattgatgataattcattatttgattgatacggagatatagagtccgaattaattaatttattatcatttggaattatattaatattattatcatttgattgagagcgtttaactcttgtaactggagtatatggcataacgatgtatttaatttatgtaactctaagggtatcaattataagataagtatgtatttccttaattattgtgattggaaattatctccgaaaagataacaattagaaattaaatgaatataggatagtatatagtatataacagtatataatatatataagaccagtctaagagtacactactactttacttaccaattctatctctcttttagatactgaaaagaagataaagaggtattgtaatatataatactgggttttaggttaataaaataaggtgatgaatttttaaatggaaattaccgttcttgcctatttgggaagtattcttattcttatatgttgtcttttctttatgaataacaaggttaatgaccactaatggcagtgaaactggttcaatacatagaaatggatataattattcactttggaatatctgggtagcttcaacattacttaaaatattattattcccaacattaccttcacatgatttcaatgtttatagaaattggatttcaattacaaatttaattccattgaaagattggtataatgaaacattatcaccatacccattgaaatgttcaccattttttgcatatttccaatggattttatcaaaaatttctcaatatttaatcatatcagataataataataataataatagtatgaaaataattatatttcaaagaagtacagttataatatctgaaatattgttatttttggcattacaatggtttattgatatttccaagaataataaagaaaagagaagaaactttgtaatttctgcatcaattgttttatcacctggattattcataattgatcatataaatttccaatttaatggatttttattcggtattttaattttatcattaattaatgcaaaattaggtaattatttaaaatgttcattttggtttactatattaatatgttttaaatcaaattttatatttatttcacctgcttatttaacatttttaatttcatcatattgtttaaatccaataattaaaaaaaaaagttattgggattataaattgaaagatataataaatattattaattggataaatttaataaaattatcaataactattttattagttttaacaattgcatttataccatttatttattatggagttataaatgatattttcaatagattatttgataattcacaattacagataactaataattattgggcaccaaatgtatgggcattatattcatttaatgataaattattaattttattaaatgaaaaattaccaattttaaagaagttattctctataaattattctccaaataagcaatttaaaatattaccaaatattgaaaatagacatacatttttacttataattttttatcaaataatgtcaataattccaataatttttcaaccaaattttgaaagattagttggtagtatatcattatgtggatattcatattaccttttcggatggcatatagaggaaaaatttataatgatgattataataccattaacatttgtaatttgtcaagatagaagattattaccatcatttcaattattaacatcatcaggatatatttcattattcccaattttaaaaggatcaaatgaatggatgtttaaaagtttaataacatttgtttggtttattgttttccaaacaagttttagtgaagttacacatttttcaagaataattaatattaatacaagggtaattgttttagatagattaaatttaatttatatgttattatttgcaccattatgtattataattcaattaattaatataatttttaaaattaaaatttggttaattgtttatagtatttattgttcatttggtgttatatcatcatggtcatcaatttcatggctttatttccttgatgatccaatatggattggtaaagattgatattacgtaaggtctttttttgtataataatcctatattatcctatatcatcattattaagtattgtcttatcacttactcttcttaagacaagaacaatgtcaagagcatcaaagattacattagtactaagtactgcactttcaattacgacaatcggtgcagtttatttcatggcagagaatgaaaaagatgtaagtaatgtcattttaggttttatggaaatttatactaacatatagatattatatcattatagcaattacaagagggaccaattaaagatagaaaaagattagagagacgtgcatttaatagtaaacaacaagctaatttaaatgaatatgagaaacaaaaggaaatatttgcagaaatggagaaaattcaaccattaactggtgaaattgttcaaggtattgatactaggaaatagtgaagtatagtatagtatagatgtataataaaccaaccaatcatataacaaatcattcaaccgacactttaaatgaataattgcggttataaagtgaaattcgctgtatagtaaagtagtctttatattattatgattgtctttataatgaatcagttaataatactttcaattagtatagaatagtatagtatgtctttatcttcaattagtaaaacattaattagaaatatgagttcaaagacaacacaaattatttccaaaaatgcaccacctgcagctgcaagttattcacatgcaattaaggcaaatggttttatttatgttagtggacaaattccatatacaaaagaaggtaaaccaattgaaggtgattttaaagttaaatcagatcaagttattaaaaatgttttagaaattattaaagattcaaattcaaaattagagaatattgttaaatgtaatattttccttaaagatatgaataattttaaagaatttaatgaagtttatagtaaatattttaatgattataaacctgctagatcatgtgttgcagttgctgatttaccattaggtgttgatgttgaaatggaagttattgcagttgaaaattaatacacagtacggagtacgtagtacgtagtactgttatttacaaattatatagctattgtataattgtaatacaattataatccctacttataatatgttaattgtaagttaattgtaatatactctatagataagataaagataaagataataaaccaagtacaaaccctcgcacgtgacaaacagcagggcatgtgtattacataatcaacagtaaataaaaaatcactaagaaaaaatcatccgcgtctctcttcacttagtaaaatactatactactaataaaagacagtcacagagaaaaatagagagcgagagaaagaataattcttcaatatgagaaaaatgaaaaaaattaattgaaaatttagttatcatagtaattgaaagttaatagaaagattttaacttttatcttttcaaaagtaaccttcatcacatagacaaaatggctcaaagagttaccttcagaagaagaaatccatgtatgtattagttcaaatgattattgtatttatattagaatattagaataataaactagtgaaaaataatgaaattaatgaaattaggaataatatcaatatcaagataataatgtagacatatattataagaatataaattttgaaattagaatcattaaagaatataatgttaattacaaatcatataagaataaaagaatactatcatatcatatcatatcataaattattatactattattctaatatcaatacttcaatagaaaaaaacaaaatactaacataatcgtaatccctcatttctttatattattacagataacaccaagtcaaatcaaattaaggttgttaaaactccaggtggtagattagttgcacaacatattaaaaaacaagcaactagaccaaaatgtggtgattgtggttgttcattatcaggtgttgcaactttaagaccaagagcatatgcatcaatttctaaaactcaaaaaactgtttcaagagcttatggtggttcaagatgtgctaattgtgttaaggaaagaattgttagagctttccttattgaagaacaaaaaattgttaaaaaagttttaaaagattctgcttcaaaggcaaagaaataagtaaatttataagtctatactactttatataataattaattattgaattaattgctaatttatcatttaatttaattaaatttgcaaaatcaatatttaatggactattaggttcttgattattaagtaaataaattattgctaaaattgaatattctaatgtccaaattggtgaccaattatcagttttcaaaatatctaaacaaatttcaccagttttaaaatctatattacaatgaggtatttgataagttatttgttcatctatttgactctcatttgttataaatttaattattggaggtgttaatggatatgtattagataatttaattgataatttataaaaaccttttttataaattgtttcaattggattaattattgcaatccaatcaaataaattattatcatctattggtttaagtgaaattatcgattcagataatttattatttggattggaatatttcttaaattctttaagtaatctcttttgcgcatttgacataactggctggatctataatacatttaaaagcaagatctatagggacagaatattaatcattattattatcatgatatatatgataacataatctattataagatattcatcagccgcaaacagagcgtacaatgtggctggtgagggtattcctttatactattctatctttaagataatgatagtaagagtaacttatgatgatagtaagatacatatgatgatgataatcttatatcttatcagtcataatcaaacttacactatgcagttcttataaatcttataaaataaaaacatcttttcttatcttatcttatcttatcgtgatgtcaaaaaaatatctttatttttatttttatttttatctttgttcatcttgtttatcttcttttgtttatttacttacttactctttcttctctacttctattatacaacaaagatgataaaatacggcaatagaataacaaaaacaattaatttccctaatcataaccaatacaggaaattaacaacagacatagaaatacttggaaagaataataaatccaagactatcctcaatatcaataccaatatcaaatacaaagatcttaacagtgatagagtcaataacacctggcatatcaatagaaacacactctatttagacatattgttcaataacagtaacagtttccttattgagccttataaagacaggtcgtcccgtcgatgaatataataatatttaatttattatacagccattatctattgtttcttattaattgaatgaatgaatgaattggtatagtagttagctagatagttatagtatatataagtaattatataataaatataatcatttaagaaatataatagactaagacatatactaatgtctttccatactgaccaaagattctcttctaataatttatctgcttcttttaataacagtacaattaataataataataataataataataataataataatagtacaaataataataataatataactaaaccttcaaattcatcttattcatttcataataatatgtttaataataataatgtcaataataatataattacaaatccaataattaatagaaatcattcagcatcagtttcatcatcttatacatcaactacttcaccttcaaattttacttcttattcttataatagtccatctgctttacctccaactcatttatctaattttcatagaaattcattatcttcacgttctggttcatttgataattttaataatattaataataataataataataatatcaataataataataactttccatcctctaatagtataccgataaatgtcaataataccactaccaccaacaatagtttaagttcaagtttaagttcatcatacaacaacaataataataataataatacattatttaatcaaaattcttcatcttttatgtcatcatcattaactcccgctggtcgtcgaagtttattgacatcaaaacttaaacaacaaaatcaacaatctttacctaatgataatttatttcgaaaaacttcaaataattcaattaatagtcaacatggaaataattcattttataataatttaaattcttatacacaaaaattacctcaacttcatccatcaaataataataataataataataataataataataataataataataataataataataacattattaattttaataataatataagttcaagtattggatcaaataataatactaataataatcaaattcctataccaattaatactaacccaaatgatgcatttttcacaactccttatccaacacctgcaactgcaacaactaatttatcaaaagatttagcattttcaacaaattcaagtagttcaaccctttatcaagatgcacaatcaaatattataatagaaaataatactaatactacagatccaactaatcatcaatttatatctgtttctgcacctgcacattctaatcctaattttcatactaatcatcaagtaaataaccatagcacaacacatattgaacaaccaaaaccaattacatcatcatcgagtgatcatttaaatatagctgattatccagttgatgaattattacaaatgttaagtgcattattacaaaaaattgttgaagctaatgatttattacataaagataataataacagtcatcatcagaataataccactaatttcacacaaaatgatgaaggtacaggattattaaatagtaaatataatgcaaatgttttatcatttcatggtagaaatgtacctgcaatttcattatatgcatatcttagtagaattttaaaatattgtccagttacaaatgatgttttcttaagtttattagtttattttgatagaattgctaaaagagcaaataataataataaaactaatgaagattcaattatggaaggtgataatgaattagatacctctcatgaacaaatatttgtaatggatagttataatattcatagattaattatttcaggtataacaattgcatcaaaatttttcagtgatattttttataaaaattcaagatatgcaaaagttggtggtttaccactagatgaattaaatcatttagaattacaatttttattattattagatttccaattaatgatacaagttgaagaattagagaaatatggtgatttattacttaaattttggaaaagagaacattcatagtgtatattacgtaattaaatataaatacttttttttttaatttttaatttttcttcatgtagggtttattaataataataatgttattactgtttgttcattagggcaacaatcatggctaagaaatcaaagagtcaaaagaacaagagtaagaataataataggagtaatggtaatgctaattctaccactacaataatcaatgaatttgcaaatatgaaaaatattgaagaatctgaagataatgaagataatttagaattacgtcgaaatttgaaaaaacttatatcaaatatgaatgataatcaattaattaaatgtatgaatgatttacgtgatggtaattttcaaactgaaaaatttttagaaattatggaagaaatattaattaatgaaaataaggaagaggaagaggaacaagagagagataataataatgatgaacgtataatagaatattatgaaaatgaagaaagtagtagtcttgacaatgggaacgataatgatgacttagatgatgatgaaataattgatgaagaatttagtattgatttagaattatcaaataatttctttgatccatataaatttcatgatacattatttaaaattttacaaatacgaccttatccaacaaataatgaaagaatttataaattatttattttaatggcaacattatgtgatccatatacacaacctttagatacaggtttaaataatgaaatgattttaagtgcagatttagtttctgatttaataatttcaattataattaatgaatataagaaagataaagattcaattaatttatcatttgaaattagttatgatattgcatttataattgaaaaaattatgaaattacttaattgtgataatgaaaatttattatcaaatataaagaatgatgaattaaattgggaaaatgaattaattaaatggttaccacataaatctttttcaaatttaattaatataacaagtgatttccatcatttaatgttattatatacaatttcaacaattggatttttaataattgaaaaattatttagaaaaataacaaataataatatttgtcttaatccatttctttcattttttttacaaatttggaaaaatcaaacaagaataatttatctttgtattgaaattgatagaagggatgaaattaatggattcccaggttatcctgaagttattagatttataattaaaggttcatcatcaattagatcaatgatttcattaattttaaataatgattttaataaaagattacatgatttaaaacatgaatcattaattaattttatgcgtccatggggtcgtaaattttcaaatggttcaattaataaagatattagaattttcattgcagctttattagcattaggatctgatttagatagtgtaactgaattattatttaattttgatcctgatgatagatatgatgaagatattaaatatatgtttgaaattgaattagattatatggatagcgaagggaataaagatgagaataatgaggagaatgacattaaagagaaggagaataattataataaacatcataaagaaggtgttaaatattttggtaagaatagaattttagaaattgagagacatgatgaagaaattgatgatgatgaagtaattaatgatgaatggaataatattaataaaaataataatgatgatgatagagataataatattaattatgatttacatcctgattgtaattgtgtatttgaagattttgaaagtgattatgatgaagaggaggaaggggtggaaggagaagaagaattaagaaatgataatttatcaacaattaatgaaatggaaatgattaaacatttaagtcaattagatttagagagtttgaatattgatgaaattaaatcacttcatttagaattagttagaaatataaataatggaccacctgcaattcgttctaaaaattatgaagaagaagaagataatgatgataatgattggagggatataccaagaggtgataatattttactaacacaggaatttattgaattattaaaattgtcaatggaagattccaatatatttattacaccaattgataatttaatcaaagcattaaagaaaatgacagaaaagacattaaataatgaaatttgtgaaaaaattattagaagtattgcatgggttgttcaatatgagaatgaaagtttaattatgaataaagatgatgaagcaattaaaaatagtgatccaaatattaatagtgatgttatttataattttttaaaaaatgatgataattttattaaaatgattaaatttaatccattatcatcattttcaataattgatgaattattaatggcatcaggttatagaagagttttaatttggtttttaactcatttaccattaaatcaatggttaattaattatttccatgatttattaattggtaatagaggtaataataatgataatgatattaaatttagttttagtagaattggtaaattagaattaactaaaattgagaaaatgatgttattacatgaatttttatcaaatgcagttatatttttatcaagaggttcatcatatgaattagaggatataattaatgagaaggtaaatgatacaaatgatgaattttcatcatttataactaatagatcaaatgcacaaaaattaattaaaataatttgtttaatgcttaaatcattagaaaaaaatgggattttaaatccaaatgataatgaatataaagttgaaattcaaacattattagttcaatgggttggagttggatttgtacctgaagcaagggaattattcttcagatattctacaaataatgatgatgaggagagtagtaaatcgaaaaccaaatcaaaaactaaatctaaaactaaatctaaaactaaaacaaaggaaataattataagtaaagacaataaaattcataaattaattaaagaattgaaaaattttgattcagttgatattttcatgattatgttaaatattggtaaacattatttaattgatcaaaatatttgttttaatttcatgaaagatttaaatttattatcaaatatttacagtaatgaagaagatttaattaatgattgtaatgaaatttttcaaccattaaacaatgcaattattaaaggtgatgaagagagtgtaattgaaattagttattcaagtaaaatattagattctaacattggaattatttatgcaagacaattagttacaattttcacagagagtaacaatggagaggatagtgatgatgataagaagaaagttagggaagatttccatcaattaatgtgttcatggacccaaaatacggtagcaaagtaaaagtgtataatacgaattgtatagtaagtgttaataattacgtaatgagaaaatggcgatgattttcatctttatagggttcatgaaattttgaacatgaatttatacttataggtcctttatcatcacaagggcaaagattatgagtgttatatcagttgattgggagtataaatcatacagggtcaatgtaacgccaaatacattattacgagatgtattaattgaatcatgtaaatattttaaaattgatcttagtaatgataattatgattatgaattagttaatttaaagggtaaatcattagatttaagtaattcaattagatttagtaatttagttcaaggttcacatgttgaaataaggaaatgtaatagtaatgataataatattttggttaatatacgtgcaaatgttagtattgaaaatggaaagaattatgttattacacgtaaaattagtaataatattacaattaatgaatatttacaaaatattattattgaagagattttaaagagtgatgaaaaatttgaaatgagtagagtaaaatttattgttcaaatcatgatgaaagttgtatctgatgaagaaatggataaaaaattaaaagatattggattaattcaaggtaattatggtattagaattatgattaaggatggagttaagaaaatggacaaaatgagagaggaggttaatccgaagacagaaaaagaaaaagaaaaagaaatcacaaatgaagatgttgtaatgaaagatgatgatattagtaatgacaatacagatataaatttaaaaacggagaacaaatcgtcagttgatgtgattgatagttcgttacttgatgaaggcgaaaaaggaggagaagaagatgcgaaatttattaagactataattagatctgagaaacattttaaaattaataatgaatcagatgatgaaggtggtatttcagttgaacaattaaaagggtatcaaaaaatattaagtaaaagggctgaaaatgaaccattaatgactagatcaatgagggagaaaaaggctaaagagaaagaaaaattaaagaattcatttattgaaattaaatttcgggttaaatttcctgataatgaaataattcaaataagtattgacaaaaatagagaattacgagaattaaggagaattttatttgaagatgttttaaatgaggaaatagttaataagattaaatctgataatgggaataaaattaaatattcattaagtgaaatacatccgtataaggttattttcaataatgaaagtagggaagatgagataagggttcaattgaaagatttaaaatttattaatcgagtatcattaatgtttaaaattgaaattgatgggaataagagtagtatagaaggaattaagtttgttaaaaatagtatattaccaattgatgatattaatagaagtaaaatgaatggaaataacgataatgatgataaaaaaaagattggtagtggcgtggtggaagaaggagaacaattaaaaattgataaaaatagtaataataaatttgaaaaatctatccaaaagaaaaataacaagattgttcctagttggttaaaattaaataagaaataagtatacttcgcaagtgacgagtataattgttgtcttttgtcagcatttcaggggaaactgatgcttaaatatgggcaatggtaattacaattttctctacagtctaagggaaattttcgaaccctattatgttactgtataattgatctttaataacaagctaataagaacaaatgtcgttaaaataaataattggaccttaaactctgtaaactgtaaagaacctattattaaatttgtaacatgaaaaattaaggtgtcataaaattttgaatatctggttacgtaatcaactacatttataacttttcaaaaagctttaaaatcagcattgattggaagtactacactttcttatactttttgaatcaggcattaatggtaccatatgaaagagcaaacttttctctacaaaatatcacacgatcttctgtcaattgattttcaaaaaaaaagttatctttattttaagatttttttgtcaaaaagaagagcaaaatttaaatacatttaatggtgacatttctctgtaaaaacatttttaaacaatagaagatactaactatatgaagttactaacaaaaaggtttgaaacctaaaaaagtttaagaaagggcaatttattatattttattatatctcaataaggtaatattagtattattgtaaagagatttatacgatctacactttaatacctcaaagggtatttgaaagagctagacccttctgtttaagatatagttaactaatttgacagtaacccaaataactgaaaactagaggagaaatcttaaagaccgaggtaagtatcttatgattctaatcaaattaggtatagtattaaccgtcttttagaggctaagtaatagaaaaggtatatgagccgtttgaataatcggattattattaaacttcaaatggctataatttgatattattcaggaaatgcaaaataatcgcagcttttaagcgtcatattaatgtattattttaatgtggtaataaatagggtttataaggtttataggatttattagtatttatattgttaactccgctttgaatctgaaatacgaaatacgaaatataaatacaatcaattaatgttccattaatggtattactacgcgacattacgtaatccggtaatgaatttattgacatattcgaactgtttttatttttcgccttttgaagttaccgagttccaacgaaattatcctcgtttctttttaatttccttctctttccttcttttttttccttctttaatatactcatcaattatgtccgttgtttgttccttaattcgttgttaccccccccttgaaatttatatttacatttttatataggttgttatactatattttgtactagttaaattcaatcaattggtaattaagtctgttcaaataaacttctcgtaaatatttaataatttgtatggttacaatataatattattaaatgaataattattatttgttaaattttattatgatatattatactacccaatatctattagagtaacgaataaggaaactccaacgttctcgtattaatcaatttacacaaaatactacatttgaacgttaatatttaacgttcccactgtaacgaatttgcaatagatctgatctattaaaagttgagatttgtaaaattgtatatgaaaattcggaaaaattacttaccgttagtattaggaatcaatcacgtcactttcatgtaacaatagtaatattactataatagtaatgtgacaaaaataacgtcatatatttgaaatctcgtaaatatatattacaactgttttacagccataatattaataccgaaatacattaaacgtaaacgtcatttaataccgttcatttccatctccggaagtcaatctcgtttctaaaaaagaaatttttcaagatctggaaattttttgtaaaccttatgttctttcgctcaacggttgttaatttcactattatttctgtttttcagtgaaacatttacgttgattgtaacaatccagttagattaatctactaagttaaccaattgaacaatcggttatatgacacaataatctatttttaccttttcaatttaaaccgaattcatccaaaaatactataattataattataattaattcactttactgagccgatgatcaattggatctattcttgatccctattccttatttctattcaattctaattgttaattctaatttctaattatataatttggaaaattttaacttcttataaataccttgatacttccacaacatctttttgccttatctattcaattctaatttatttttttattttaatctattatctttctttcttttactatcagcaaattagtctaatacaagtttgaaaacaaatatattatgcgtttttcaactttttcattagcttcattagcattatcttggtcatcatcagttttagctgatttccaaggtagattatcttctgctaatcaaggttgttccatttctggtattcaatctgttaatggttattctgctaaattttattcttatacttatagtgatttaacttatactgatactaattattataatggtgcttatacaaaacctggtttaattacaactgttgcaaatgttccttctgctaatttcattgcaaatgagggttatgcaacaactgcatctggtgaattatttggtgcagaaattccaattacaaattttgctcttgaattaactggttatttttacggtacgtattcatcattcttaaaatttgtcttctatcattaaaacattatactaacattttattacttcttctttttttttcattatagctgaaacaacaggtatttacacattcactatgaacaaagtcgatgaagctgctatggtttggatgggtactggtggtttcgattgttgtaatccacaattaggtcaattaggtcaagcaaatcaagcaatcatgtttgcaagtaaagcttggaatgcagcttcagcttctcaacaatcttatgtttatttagaaggtggtaatatgtacccaattagaattgtttatattaatgcaatttctgatgcttcattaaattttgatattgaagatccaagtggtgcaaaggctgatagttatgtttatcaattaagtggtgatattaaaggtggtcaatgttcttatgtttcaactactgcttcttggagttcaactactttctatgtaactgatttagttccaggtacaactgttactcaaccttattatgttactgatgaaaataatagtgttaaaacttatgttggtattactgttggtgttgattattctgttacttcaactgcaactgttacatctactggtactgctactactccatatgtttcaactactacatctattgttcctggtaatggttcaactggtgctgaagttgttgttattgattttgttcctcctttaccaactattacaactacttggactaataattatgttggtcaagctacaactactatgccatatactttacctgatggaacagttgttacaactgccgtcattttaattgaagaacctccattacaaactacttatacttattgggataaatcatcattttcaactggtacaactacaattgatcaaggttggacaacaattactgatgttattatttatgctccatcaatgtctgttgttacaactactggtaatgatgctcaaactcattcagcaactattttaactactattacaactaatggtgcaactattacttcatctgttttagaaattattttacctgctcttccaacaacaactattacttgggattcagcttacgcatctacttatactacaactatgacttcaacagttgatggtcaagaaaaaactttaactgaagttgtcgttaatcaaccaaaccaaaaaactatttatacaactgataatgttaattatcaacacactgcaacttcaacagatgttgtatttactgatgatgcaggtaaaattgaaactggtgatgttgtttatgtctataacagagttctttcaacttcatatgattttaatccaactaatacaggtatccaaactattacagcagtttcaactaataataatgttccaactacttttattgaaattcaaggtcctgcaattactaaaacttcaacaatgcaagctcctgtttacgttcaacaaacatcttactcacttgttactgatggtccaactccttattatgaacaacttatcttagttccatcttataaagttactgcttctcaatgggataaaaaatatacaagtttaagtactacattcactaatttaggttggacaacttcaacttatgttgttgaattagttccatcatattcacaatctgtttcatattggactaaaaattatttagcaacttcaacttttggttatacatttactgatgctttaggtgttcatacttcaacttatattcaagtttacgcaccaccaattccaactactacacaaacttggatgaaaacttttacttcaacttatacaactcttacaactaaattcgatgcaaatggtgatcatatcactacatctgaaattgtcgttgaagttcctgcaactgatgcaatcaaatcatggactacatcaactgtttttacaagtgattgtgatattaatgtcccaccttcaacaagttattcaacaactacaattggtggcgcggctacaacaattggtgtcgaaattattacaactggttcagattcatgttattatcctgtaactacttctgcatcaacatctgcatcaacatctgcatcaacatcttcaacaactactccattatccaccattacctcaactgactcaaccacatgtggttcttcaacttacactactacatcagcatccaccttatctaatggtgttgtttcatccttcgtagttgttgtcaaagaaactccagctgcttcatgtcaaagtatggatccagcacatattaccgttactattccagcaacttcctgtgcatctactagttacaccaccacatcatcatcaacccttgaaaatggttctttaactacattcccagttcttgttgttgaaactccagctgcttcatgttcttcattatccaccattacatcaactgtttctactggttgtggttcatctacttacactactacctcagcatccactttatccaacggtgttgtttcatcagttgttgttgttgttaaggaaaccccagctgcatcatgttcttcattatccactattacttcaactgattcaactggttgtggttcatctacttacactactacctcagcatccactttatccaacggtgttgtttcatcagttgttgttgttgttaaggaaaccccagctgcatcatgttcttcattatccactattacatcaactgattccactggttgtggttcatcaacatacactactacctcatcatccacattatctaatggtgttgtctcctctgtcgttgttgtcgttaaggaaactccagctgcttcatgttctccattatccaccatcacttcaaccgattctactgcatgtggctcatcaacctacactactacctcatcatccacattatctaatggtgttgtctcctctgtcgttgttgtcgttaaggaaactccagctgcttcatgttctccattatccaccatcacttcaaccgattctactgcatgtggctcatcaacctacactactacttcagctttaactttatccaatggtgttgtttcatcagttgtcgttgttgttaaggaaactccaactccaaactgtactccattaagtacttctacatctgttaattctagaacatgtggttcatcaacatacactactacaacatcaatgactctcattaatgattcagtctccacttacgttcttgttgttgaagaaactccagctccatcatgttctccattatctaccattacatcaactgattcaactggttgtggttcatctacttacactactacctcatcatctacattatctaacggtgttgtttcatctgttgttgttgttgtcaaggaaactccaggtccaaactgtagtaatattgatccagcacacattactgttactattccagcatcttcctgtgcatcaactagttacaccaccacatcatcatcaactcttgaaaatggttctgttactacattcccagttcttgttgttgaaaccccagctgctacatgttctccattaagtactatcacttcaactgtttctactggttgtggttcatctacttacactactacctcaggttcaactttatctaacggtgttgtttcatctgttgtcgttgttgttaaggaaactccagctgcttcatgttctccattatctactattacctcaaccgattcaactacttgtggttcttctacatacactgttacttcagcatctactttacctaatggtgttgtctcctctgttattgttgtcgttaaggaaaccccatctgcaatgtgtactccattatcgaccattacttcaaccgattcaactgattgtggttcctcaacttacactactacctcatcatccacattatctaacggtgttgtttcatctgtcgttgttgttgtcaaggaaactccaggtccaaactgtagtaatattgatccagcacacattactgttactattccagcatcttcttgtgcatcaactagttacaccaccacatcatcatcaacccttgaaaatggttctttaactacattcccagttcttgttgttgaaaccccagctgctacatgttctccattaagtactatcacttcaactgtttctactggttgtggttcatctacttacactactacctcaggttcaactttatctaacggtgttgtttcatctgttgtcgttgttgttaaggaaactccagctgcttcatgttctccattatctactattacctcaaccgattcaactacttgtggttcttctacatacactgttacttcagcatctactttacctaatggtgttgtctcctctgttattgttgtcgttaaggaaaccccatctgcaatgtgtactccattatctaccattacttcaaccgattcaactgattgtggttcctcaacttacactactacctcatcatccacattatctaacggtgttgtttcatctgtcgttgttgttgtcaaggaaactccaggtccaaactgtagtaatattgatccagcacacattactgttactattccagcatcttcttgtgcatcaactagttacaccaccacatcatcatcaacccttgaaaatggttctttaactacattcccagttcttgttgttgaaaccccagctgctacatgttctccattatccactgttacctcaattgactcaactacttgtggttcatcaacttacactaccactactgaaactactcttccaaacggttctacttcatcagttgttattgttgttaaggaaactccagctgcaatgtgtcaaactgctagctacaccaccactattacatcaattttagcaacatgcggttccgctactaccaccacctcacaaggtcttgttactggttcagatagtgcagtttctgcaattgaatatgttattgttgaatcaccagctgcttcatgttacagttctattgatccataccatttcactgttacacttccatctccaaactcagtctgtgcaactcaaactgttggtactacaactactgttattgttatcaatgaatcaactatcactactcaagcaattgttattgcaactccagctgcatcttgtttctctgcaactgaaactctcaacacaatcacttcaactgaatcaactggttgtggttcatctacattcactactacttcagcaactacattagctaatggttcagtttccaatgttgtcgtcgttgtccaagaaactccagccccaacttgtaaccctaatgcatttactactactgaagttgcatttgattgtgaattcacatcatacactacattcattggtaccactgattactatggtaaatatattaatgctacattagttgttgttgaaacaccagctgctacatgtaccgaaatcccaaccttaactactactattgatgcaactgattgtacatccactgaatacttaaccactgttgtctctgctggtgttactgcattcttagaagttattgaaactccagctgcttcatgtgctacttcatcaattgatccagatttcagaatttcagtcattacatcagctgctactgattgtgttgctacttcatacactcaaatcgatgctgcagctactggtacaaccattgttgttttaactccagcaccaagttgttactcaacaactacttcagttgcacctgttgaaactacttcagttgcacctgttgaaactacttcagttgcacctgttgaaactacttcagttgcacctgttgaaaccacttcaactgattatgtcgaaaccacctcaacttcaactatttactgtactaaatgtcaccacactacattcaattcagctgttacaactgttactaatggtgttactattactaccacagtctgttatgaacaaactccaactgataatgctccagaatctactgcaactgtcgaaactacttcaacttcaactatttactgtaccgcatgtcatcatactacattcaattcagctgttacaactgttactgatggtgttactattactactactgtttgttatgaacaaactccagttgattcaacttcagaagctgttacaccagcaccaactactccaattgctccagttaatccaactgccccagttaccccaactacaccaggttcaccagctcaagaatcaagtacatctgttactgctactacaacacctgcagcaccggttagtccaaattccccagaatctgaagctccacaaggtaatggtgtaacaagtacagtatacccaggtaacaatgattacacttcaacatcatatgtttcacaagaaacttcatctgcacaagtttcagtctataatggtgcagctaacaaggttggttccggttttgcaccaattgcaattatgttctttgctttaatgatttaaagttgataaataaaaataaaaaaaagatacgtttaattctcgatcattttattttaatttattttttttaatttcattttacttcaattcatttttgtatattttgtcataaaatatactcctttcacagttgcattcttcttatatatacttttactatataaaatttcacaatgtcttcgttgtgattaaaattaatttgttctcttttgttaaaatttttttatcgtaattaaaaaatagataaatcgtgtaatgaagtatttgaaacgtttaaatgtttgaatattaatttcttactatccttaactatatataaattttcttactcttgtttattctaaaacaaaatcaatttatgaattcatatatcaatataatggcgaaatataaatgaaaaaaaaaataatgtcttcttgaaataaataatttgaaattcattttttattcaaatgtatcccatttaacttaaagtgatacattattacttggtgtaattgttgacccactattaaaaacacaatcaaaatgataagagaacagtaagtgacttaaaaccaggacgtcgatgagactgaatgtaagtactgatacattgtagcttgatgaatcaaagatcatgaaaaagaagaaaacgtggatgtactctttacatcaaggcaatgtttttataatttggattagtgatcaaatagttatcattataataataataataataacaattatttctttgaaatagttcataaatcatgcaaattttttagctggttactatgatttattccgtatatattatatatatgcaacttgaataaaaagaagttatcaaccattcccactatatatatatatatatatgattaccatagtgaatggcatatgctcaagagagaaatagaggttgattaccgttaccaagacaattaaattcttttggtattttgctgaaaaaaggaaagtgattatcaactttagctttttggtgttggaatacagattgatttataattagaaaagtacatgtagtatttaacttagttattctacgattgtgataagtatatcgtttttgaagaaggatcaaaaatatatagagtgtagaaatgaaatcaaataaattttagttaactcaaattaaaaatattttttgttacgtcattgaatgtatattgacatatttggttaatttctttttatagaataaatccatgcaataagagttaagttgaatataagaataatataatgatggatacactaaatttagttgaagggaaacggtcaatgacgtatagatgaaattaaaagggttcttttaaataaaatcagctttttttgagagaaaacgtatatacagtctctttagatgaatgagactaactagtaatattcggtaaccaaatgtatatgttggtttagtccgctgtaactttatttatagccaccggcgatgattctttagttcccagtaaacttcccccgcgcttaataaaaatactggggattcaaaatttttacgggtagttgaaaatgaagttacaacggacttaactaagatacattcgatttttacatattactagttagtctcatttgattaaaaagactgtatatatataaaactgaacaagcttttaagtaatagagatagagggcatatattttaaaaacttgacgtggatcagcattatacattcaataagaagaaggaagtttgcatttgtaaattttgagtgactaaatgtattttaagttatttctttccctaaaattactgatgattcaaaaatgtgttaaagatccagacttgataatgaaaacaaatccaaattcaacccctagatctctgtcatgattcagctactacaataaaaattaaaagcctgaatagataataaatatttaagcgttgatccatccttctccataaccttcctattgtgtaagctcccaataagtaggcagaaaatttaacagacagaaaatttcgatccttccgctaattttccagcttttaattaaagaacttactgattcgtttaatcgtacttatttacccactaaataaatattatcaacggttacagggttttcagtgctttaactacttgtggtagatgaaagtatattaagtaaatcatataggaacatctagtatcaaaatgtaagttaatatacccagaagactgacataattataaattaattaatccaaatttggaaggaccccctcattttttttaaaaatttctttttctttttttcttctatttttagctatttcccgcagtatagaattccatggaataaaaccttatttaattttactatggtaatttaatattttattacttattccgtgcattaaacgcttttattaatgcaggttaatatttaataattttcgttgatgtcatcatttttcaccttttttgttccatagtaatcaattattacatcataataaaacctaaaaataaaaaacaaaaaccgttttaaaggtactttcccacttatgaccaaataattccttccccgtgggctcgttgctaccctatagttcgcttagtattgccattctacatataaaatttttaagtaactttgcagaaatatattaatttcactaagagacaatctattttgtttgattttgaacaatagctctattcaaaaattgttatctaaaccttctttttaactcatctttgtccttctcttttcttttttttctgcttgtggataattttaaactttctcagccaatggtcatggtcatgattatgattacagaatgaacccttgattttattattctctaaaataaaactccttttagcacggagttactcaaattttaccttctaatattgtataaatatcaacttaactgcactatttttagtttattttaccatccttttacttactttattttatttctatttatattctatgttatatcttttttttgatcatcgaaagatataaaactattttaaaaccaatgcgtttttcaaccttttcattagcttcattagctatatcttggtcatcaacagttttggctgatttccaaggtaaattaaattccgcaaatcaaggttgttccatttctggtattcaatctgttaatggttattcagctaatatttattcttatacactcagtgatttagcttatactaatacaaattattataatggtaattataaaaatccaggtttagttacaactgttccaattgttgaaaatccaaatttcgcaagaaatgatggttttgcaattgctgcatctggtgaattatttggtgcagaaattccaatcacaaattttgctcttgaattaactggttatttttatggtatgtgtcaataacaactactttttttctttaattataaaaaaacattttactaacattcacctcattatttattatagctgaaaatactggtatttatacatttacaatgaatgatgtcgatgaatctgctatggtttggatgggtactggaggttttgattgttgtaatccacaagtaggtcaattaggtcaaagtaatcaagcaatcatgtttgcaagtaaagcttggaatgaagcttcagcttcacaagagtcttatgtttatttagaaggtggtaatatgtatccacttagaattgtttatattaatgcagtctcagattcttccttaaattttgatattaaagatccaagtggtgcaaatgctaataatcaagtttatcaattaagtggtgaaattcaaggtaatgaatgtaaatcagtttatgcaacaacaagtttttcatcatcaacctattataataccgatttaatgccaggtacaactgtttataaaccaatgacttacactaattctaataatgaaattgttacttatgttggtgttactattggtattgaatctgttgttcaaaccacttttacaagaacttcaacttggactaatacaattacttcaacaagtagtggtacaactgtatatgttaataatggtcaaacagatggtgcttacgttaatattgtctatgtccctgaattatctacttatacaaccacttggacaaatggttatagaaatgttgttgaaactactatgccaattactttagatgatggtacagttgttactactcatattattttagttgaagaacctgctttacaaactacttattcttattgggatagaactgattattcaactggttcaattacaattgatcaaggttggacaacagttactgaaattttagttgcaggtccttcattatctactattacaactaacggttttaatccagttactgctactcgtactgttccaactacaattactactaatggttcaacaattacaactactgttgctcaagtcatattacctgcattacatacaacttatattccatggacttcaaatggtagaactacttatacttcatctttaactactactgatactaatggaacaccaacggaaaccggaattgttattattcaaggtcccccaaaaatgactatatacactgaagatccttcaaagaattatttattcacatctactgctacaggtgtcgttgtaactaattcaaatggtaatgttgaaactgatgatgttgtctatatctataacagacaacttcaaacttcatacttatttgattcaacacacactcgaattcaaactactactagagagacaaccgtgcgtggaactaccagcacttatgttgaaattgaaggtccagcaattactgaaactactactatggaaggtccagtctatggaattacaacaaaaatgtcattaattaccactggtgctactccttattatgctgaagttgtcttagttccttcatattccgtatcttatacagaatggaataaaaaatatactggtactattacaactgcaaccaatatgggttggaccacatccacatattatattgaacaaattccatcacattcagaaactgttgtttattggaatagaccatatgctgaaactcatacatttacatcatcattaactgatggattaagtgtttatgcaactacttattattctgttaatagaccagcaatttccacatcaactacaacatggttaaaatcatttactacaacttatacaacagttgaaactatcttcactggtaatatccatatcactacatccgagatcattgttgaagttcctgctactgatccaatcagatcatggacaaccactaccattttcaccgataactgtgatatacaagccacatccaccagtttttcaactgaaactgtcagtggcgcagtcactacaattggtgtcgaatttgttaccactggttcaagtatctgttactacttgccatcttcaactacttcctcttcttcatcatcatctaccacatcatcaagtaccactttgagaacaatcacttcaactgattcaacaacatgtggttcatcaacttatacaaccacttctgcatcaacattatctaatggttcagtatcctcaattgtcatcgtcgttgaagaaactccagctccatcatgtacttcatcatctttagctccatcctcatcaccatttttatcatcaaccacattctcagctccatcctcagctccatcattatcctcaacaactacttctttaaacactattacatcaaccgactcaactgcttgtggttcatctacttacactactacatcagcttcaactttatctaacggtgttgtctcttctgttgttattgttgttaaggaaacaccagctccatcctgtacttcattaagtacctcaacatctattgattctagaacatgtggttcatcaacatataccactacagcaccaattacattcattaatggttcagtttcaagttacgttcttgttgttgaagaaactccagctccatcatgtaatccattaaccactatcacttcaaccaattcatctgcttgtggatcatcaacttacactactacttcatcatctacattgtccaatggtgttgtttcatctgtcattgttgttgttgaagaaacaccagcaccatcatgttcctcatcattatcatcaacagctcctttgaataccattacatctactgactccactacttgtgggtcatcaacttatactacaacctcagcttcaacattatctaatggtttagtttcatctgttgttattgttgttaaggaaaccccagctagatcatgtactgcatcatctttagctccatcctcagctccatccttaactccatcttcaactccatcatcagatccatcatcagctccatcatcagctccatcctcatcatcaaccacatcatcagctccatcctcatcatcaaccacatcatcagctccatcatcagctccatcatcagctccatcatcagctctatcatcagttccatcatcatcatcaaccactgttttgaataccgtcacatctactgactcaactgcatgtggttcatctacttacactacaactttagcatctactttatccaatggttcagtatcctcagtcgttgttgtcattgaagaaactccagctccatcatgtacctcatctgtttcagtcacttctattatcacttctactgttacatctcatgcatcgacatgtggttcagaatcaacttttacaacatcttcaatagttacagcatcaaatggctcagttcaaggtactgtttatgttgttgttgaagtaccagaaacttcatgtagctctgtcgatgcattccatacaactgttactattccagctactaatactgattgtacacctgaaacatttactacaacaactgcttttactattagtggatctgttatcacaaccccagctgttgttgttggaactccacctgcttcatgttattcttcaagtgaatcattatcttcatcatcttcatcagcatcattatcatcatcttctacaccactcaacacaattacttcaactgaatcaactggttgtggctcagctacatatactaccacctcagcaactacattagctaatggttcagtttccaatgttgtcgtcgttgtccaagaaactccagccccaacttgtaaccctaatgcatttaccactactgaagttgcatttgattgtgaattcacatcatacactacattcattggtaccactgattactatggtaaatatattaatgctacattagttgttgttgaaacaccagctgctacatgtaccgaaatcacaaccttaactactactattgatgcaactgattgtaaatccgctgaatatttaagtactgttgtctctggtggcgttactgcattcttacaagttattgaaactccagctgcttcatgcttcacttcatcaatagatccaacacatgttatctctactattactaccgttgctaccgattgtgttgcaacccaaattactcaagttgatgaagttgcatctgatactactgttattgtttttactccagtttcaaactgtgaaattggaaccttatcaacttctgaaaatattccaattatttcatcaactactgatggttcttcaacaagcgcatctgctgaaactactttaacttcaagtgcatctgctgagactacttcaacttcaagtgcacctgctgaaactgcatcaacttcaagtgatcctttcgaaactactccagcttcaactacatctactgaaaatactttaacatcaagtacacctgctgaaactatttcaactgattatgtcgaaaccacctcaacctcaactatttactgtactaaatgtcaccacactacattcaattcagctgttacaactgttaccaacggtgtcactgttactaccacagtctgttatgaacaaactccagttgataaccttccacaatctacttcaacttttgaacctacaacaacttcaactatttactgtaccgcatgtcaccatactacattcaattcagctgttacaactgttactgatggtgttactgttactactactgtttgttatgaacaaactccagttgattcaacatcagaatctattacaccagcaccaactactccaattgctccagttaatccaactgccccagttaccccaactacaccaggttcaccagttcaagaatcaagtacaattggtactgcaactacatcagcaacaccagttagtccaaattcatcagatactgatgcaacttatgtcacattaccatcaaataccgtatacccaggtaataatgattacacttcaacgtcatttgttccacaagcaagttcatctgcacaagtttcagtttataatggtgcagctaacaagattggttcaggttttgcaccaattacattaattttacttgcattcttgatttaaatttctaaatctggaattatttttttttttttcattttcattttcattttcaatacactatttgcatttattctttaatttatcccataatacactgaaattatttatttcatcgtttattcattcaatcactttatttaataatatttttcaatattgcatatttttcaattataattataattataattcggtttttaataaatttttttacatataatttccaatttgggctttctttttctaactttctaacttttatattgatatcatttatacataaaatatagacactttaattactattaatttaatcaattagttggtataatcttatcattttgaactgatatcaaaaataacgacgcgcccatttccaagagaaaactgttacgtaaacaacgattagataaacaattaagtaattagcaacatgaaattatcagaaatcaaaacattgataaagaaacggattttcttttatagatctaacgataaacacaagatcaatggtttccgatacgattaaagtatacgtacgttttagacctttgagaggggaacttctaaatgaagaaaatattgaattacatgataatgaaattaataataataataataaacttagaaatagatcaatttcacccaaacattttcaaataattgataattcaacaatcaatattcatccaataacatcacagaaaatcccaaaattatcaggaaatgaatataaaagaagtaataaccctgaaaatgtaaatacaagagaattaacatttaaatttgatgaatgtttcacatcaaatatttcacaatccgaattatataatcgtacaatattaccgatattaccatcatttcttcatggatataatataactataatatgttatggacaaacaggtagtgggaaaacatatactatgacaggaggagatgaatcctatagtgagaatgaaataggtataataccaagattatttaagagtatttttttggaaattgatgaatcaccggttacttatcaatatactattggattatcatattttgagatatataatgaaagtataattgatttactgaatcctaaatctaattcaaaaaatatatttataagagagataattgataataataatgagaataaagtatatgttgaaggattagagaaaatttatgttgcaagtgttgaagatgttcaaaatgtaattaagattggtaattcaaataaaactatagctgaaaccaatatgaatgataaaagttcaagaagtcatacaattttaagaattgaattaaatgttcaaaaagatgatataaataagaaagaaatttttaaaagtacattatttttagttgatttagcaggttctgaaagattaaataaatcaggtaataatttattaaaggaaacaattaatattaatttatcattatctgcattaagtaatgtaattaattcattaagtgagagagatggaaatcttcataataataataatacaaatcatataccatatagagattctaaattaactagaattttacaaaattctataggtggtaatgcaaaaactgcaattataattaattgttcatcagatagtgaagatttaaatgaaactatatcatcattaagatttgcacagagggctaaaaatgtatataatagtgctataattaataaaattgaatatgaaaaagagagtaaaagtgaggataatggtaatgataatgaggagaccaaaacgtggaaatccaaatatatcaatgcattgaagaagattgttcaattagagactgaacttgaatcaatgggtaataatgaaggtaagagtgataataataataatattgatattaattatcaagaaatttgtcgattaagtaaggagaatattgaattaaagaatgagaatattaaacttaatgaaactattgaatatttaagggaaaataatgataattgtaatataattgatattaaaatatcattaactgaatcaattaggaaatttgaatcattaaaatcagatattgaaatttataaaaaattattagttagtaaaactgatcaaatattacaacttgaatctgataaattaaatgatatgaataattcaaaaatatataaggagatgactaatacaattcaattacagaatgattcattaattgaacaagttgagatagctgaacgtgaattaaggaataaacaagagaaaattcaagaagctatgaataaattaaatgataggaataaaatagtaaacaatgaacaagaaaatgttgaaaataaattacaagagatgagtaaacgattaaataatatttcaaagaataaagttgttgaaattgatgatgaggtaaatgaagaaaataataatactcctataaatcataaaattggaactggattgaatttaaatattataaaaccatgttaataatttggtaaatattaaatttaataagtaagtaagtacatatacatataatatgttaataattaaaagctctttgaccatcttttaaacttagtatacatctaacatcacttgtaaatcttaaactattaagtaaaggtaataaattaattaattcattatcatcaggatcattaatccaaccttcaatcattaaaccattatctttatgacgtacaaaggaaattggtgaattatcaataattaatattttcgaataatctagcgttgattttgaaatatttgatgaaatacttgaagttctcgatcttgtaggagtgtttatattctgtgtcaaattatcatctaataaaactgataaatctttaacataacctttaccttccatgaaaatacaagaatttctataatacctttttttaaaaattttcattggttgatttaatttagagtttttaatatattttttcattatatcattcatcaatacttgttcttcaagataatcaataacgggatctgcatattctttgatagaagctgtaaagcaaattaaatcaaaccattgataaacaattgataaaaattcttcaacatatggacgtttataaatatgatataaagttggtaaattacccattactttaacttcaattgatttaccctttaatttagaaattgttaaagaattatatcttgataatgaatgaatgagagtttcatctaaatcaagtaccaaagttttctttgttaaattttttggaggatttgatatattaaaattaaataataattttgggaatataaattttttctttttctttgaagatgaagatgaagatgatttcttgatttgttttcgtttagatattggtttttctattttaggatcttctattggatttggtatatctaatggagatttaaaatcatcatcattatatgattcattctttgaattaaattccattgattcttctaaaattgttgaaattgaagatttaaatgaagaactagaaggaggagtttctaatattaaaggactagaattgggtattgatattgaatcatcaaaagtatcattaattgaaggaggagtataagtaaaataatagaaaatgtataataaaagataatgaaatttaataaatgggtaaattaaaattttaataatataataaattggataataaattaataattttggtataaaaatgattgtattgtatatagttaatagtattctgtgtattatactattattatgaggtttagtgttgatatttttttgatctatcccagtatttaaagtattattatcattttcagtatcattttcaatattattaatattaatattattatttaaattatccaaactacttcgcctatgaattgttgaagttatatagttaattgaattcatttgctaaaagaagagtgtatgtatagcccaacattttaataataataatattattattattattattattattattattatcgtaaaattcatgtcgtaattgataataatcataataaaaaataattacgtaataaatattacataagcaatattacataatcaataagtcacgtgatttaaaatccattacgtaataaataaatcacgtgatttcaaaataaattacgtaataagaatatcacgtgaccattacgtaatcaacaaaaaattttaaatttcactattaaataattaataatgaaaaaacctaccgcattaattaattatactttaagtgaaaatcttcaataaacgtttattttacaaatttattagatattagatttttacaatcatcatatgccaatgacaaatcctcatatatcaatttataatactaataatgttaaaattttagtagttgcagatattagaggtaatttatcttattttaatactttatccacaattcataatcctgattttataattcatacaggtaattttggttttattgataatgaaagtatttctaaaattcatgaatcttatttacgtcatatagttgaattttcaccacttttatcaaaagatttaattttaaaaatttctcaattatcaaaagttcaaggtgattcagttcatcatttatcaaatgataatattaatttaaaatcaattttactaaattcaaatcaacaaattagtcaattaatggatttcattaatggtaataaaaatttaaatatccctgtttatactatttatggtatgtgtgaagattcaaatgttataaataaatttagaaatggtacttataaaattaataatttacatattattgatgattataatttacattcaataaaatttaataatggttcttcatcacaatcaatcttattagctggaataggtggttcattatcttatcataaattatttcatcaaggtacttcaaataatataatacctttatcttcaattataccaatttctggtgatcctggtaatatttggataactatgcttcaattaggtaaattatttcattcccttttggaatattctgaaaataatccaaatgaatataataaatcaattaaaatcttagttactcatcaatcaccaacaagagaaccattattagaacatttatcaatattctttaaattcgattatactatatcaaattctcttcattttaaatatatttcatcatttaatgatttaacaataaatacatcatttgaaacttttaaaattaaattttcagattcaagattaaaattattgaaaatttggattaaaattcaaaaaaaatatgaaaaattattatcacaatttaataattatcaattagcaagttatattcatttagctttatcaatttatgataaaataccaatttcaaaatcatcatcatcaacggataatactgatgaaaatatttcattatcattatctccttcattaattaattcaattcaatcttcaaattttaataatttattaaatttgttatcaaaacatgaattaaatcaaattatacgacatattaatgatttatattatgtttcatttcaaaattgttggcattataatatttgtgatgttgaaaatggttatcttttattaaattataatttacagaataataaattttcaatgaatacttattctgaaggtttcgattttaattatagattcgaagctacatgagaaataattatttttttttattttttttttaattttattacattacacaattcaaagacattagctaagacttattcttttgatgtagctccccaatatctgttaccatatcagggtctaagcactctcatcaaaagaattttaaaattattaaattattattaaagtggagttaccagctccgttctgaaattttattactgtcaaatataatcttccgtcctttaatttcataattcataattctaaggggggtttccttttcaaaaaatctgtttcatatctattctattcatcatcatcatcatcaatcaattaccatcatttactaccttatcataatcatcatcattttcatcattctcagtaccatcttatttatcaccatgtttttgaatcaaattcttcttttcaattcgtttttctttttttttttgttgaattaaattcttcttttcaattcatttttattcaattattttattatttagcaatgaaggggggggggtctctttttttttctaattttttaatacttttatacttttttttcttttttatttttttttcttaataacaataacaaatacaataacaaatattttaattaactttatttttaagttgattcattctactaattcttcttttattaattaaaatctcaatttctttctcatatgctcttcttattttttcttttaaataattatatctattaattgacattaaaattgaactttcattaataaattcataataaaataaatcatatgtgaaaaaatgtgaataataatttaattctttatccctttcaacatatgattcaaataaataccaaagttgacacataaatctatctcttgcaattaaataaatcatcttggcattatatgtactcttattttgtaattcaataaaatatttaataattttttttccatcatttgaataatttctggaatattttaaataataatgatataaaaattgagcaatatgatattttaaaccataatcttccttaaattcttccataaataatggtataaccttatttgttaattcacctttcctcttctcttctctaatttcatctgatactttattaccaacataaaatttgttatacatattattaagcttcttcctattcataattggataaactattttataaatttcatttaattttgattctaaattaattaataattttgactcactaccttctttaatgaaatgttcatttcctggaattaaaaatcctaaaaaatcaacaaattcaattccaattgtctcatcaatcctaacattcattaattgtcttaaatcttttgaaattaaattaagtattttatgagaattttcaatttgaatcataccaataaatttacgtggtggtggtggttcaagtttcccagttcttctcttaaaatcttcaatataatcttctactgaattttcaatttttttaatacctttcttatatttcaattgtaatttatttggctttttatatttattcttttttgccttggcaattttagctaaaaaatctttattattgaaatcattagcattagttggatatgcatatggtaatttatttgttggattggaattattaatggaacgacttggtgaggaattgatatttgttaatgaattaaaattaatatttctatttggattagtaggtgttgaaggtaagttagtaaatgttgatgttggattaataatgtttctaatggaattaaatttagaatcaaaatcagaatgaaatttattattatcatcagttgaagtgtttgttgaattgttttttgcattttctaaaatttcatatgtatcaaaacaagttgtagtagcaacagggttagtaattaaatcaggtgaaattaaattaatatcttcatcagttgaatcatcagttgaatcatcatcagcattagaactaccagcaataacaccatcagcaataccatcagtaacaccttcagcaataataccattagcaataccaccagcaataccaccagtaacaccaccagcaatagcaccttcagcaacaacaacatcagtaacaccactagcaccattaccaattccatcatcaccaacaataccatcattaccaattccatcattaccaacaatatcatcattaccaataccatcattaccaacaataccatcattaccagcattaccagcatttaaaccatcattagcaatatcattttcagtagcaattttatcattagtagcaattttatcattagtagcaattttatcattagtagcaattttatcattagtagcaattttattatcagtagcaatttcatcatcatcaacatcagtattactatcatattgactttcagtttcagtttcaatttcagtatcagaatcatcaacatcacgtaaaagacgacgatcataatcaagtggaatatttggtgcttcaataggaattgaccaattttcaggaaccggctttgcatcaagaattgaatcataaattggtagtttaacatttttgactaataaaggttcaggttcaacaaaaacattatattcatcaacaaacttaacattattattaattttttggaaatcctttgattttaattcttcaggttcaaaaagtttaacatctaataaatttgaatgagttaatgaattgataatatcattgaatccattataatctttaccagcaatacaattttgttgaaatttattaaatttagaagcagcattcataattggtggattcattgaattattaatagttgaaatatcagcagtaatagttctcttaattgatttataattataatttaattcttcaggaacaatcatagcagaaaaattaaaaccattattggaaattttaataccatgagaacaatcatatcttgtattatcattatttcttggagaagtttcaataattgtagttggattataatgcaattcaaaaccaattttagattccttgtaaattttgtataattcttttgaagggttaacatattgatgcataattttattgacaatcttatttgaaattgattgtcttaataatggaggacatggaattgcccaaccagttctaactgaaattccatttttatcatcaaatctaaaataattaacatgacatttactaccaaaggtatcaacagctgccttgtaaaattgactttttaaactgttttcattaattaaatattcatgtaaccaatctgaatgatataatttattaatagttttacattctttcatatgatgttcaataatatctttaatacattctaatcttaaagttgaattttgtttcttattagtaagaaacatgaaatcataagcatgtaataatttttcaggaatttcaattttgataattggttttaatttataatttttatcagtttttctaattctcgatttaattggtgaaatattagaattaatagttgatggtgaattaattgatgattttgataagtatggattatatccattaaaagtggatggagttgataaaatagttctaccattaacaccaataaatcttggagatctaataggtgttgaaagaatagaattttcatcaattgattgatttgggttgacagaatagacaggtttagatttaatagattttttaacagattttaaaggagtaacaggggtttggttgacagatttaatttttttttggttttgtttaacttttggtgagtaagttttaacagtttggtaagatctaaatgatagatcttcataatttgttaaactaatattattagtttgtaaattattagaagttgaagtctcaattttttcacatttgaaattgtagagagtatctttcttttcaattgaatttgattcaatatgccattttaataatggagaaacaaaattctttgtttgaccacaaattaaatgacaaatgaaatcttcatactctgcatcaggttgaacctcatgtaaataatagtcatcagaaaataagaattcagaagttttaaattgattaagtggttcaaagtgcttcttcataaagttagtaattaaagtaatatcaaaatcatatgccttcttcattgcagtaacttttttggaagtaaatgttttcttgaatttatccttcatgtaatttttaattggcttaatatagtcaagcaaaggactatcgtcaatatcagcagtatcaaatctactgtaaaataattttgattttttgttagatttgaaaaaagtaagaaaaaattcataatttctaacagagaatctccacataaattttggattttctaaatatttatcaatttcagcatcatcaatatcaaaattatctacagtaatttgaaaagcatcttttctaatttgtttaactcttaatggattttcaacacaatatcttgtaagagcccattgataaaacattaaaagttgaaatttaagaatatcagttgcatcttttcttaaatcacgtttcttaaaattagcataattggaatttctagcttctttcatttgggcagtaccacaaacagttaatgtagttggagcaacatcaaccaaagtggtttggttaacaacccttaatttatcagatgataaacgcatttcaaagatttcagtaaactaaaatagaaagtgctttaaaggttaataacaaattggtttgataaacttaatgaataactttcttataattaaattataggcttaaatcgaattgggttcagaaactttttaattcaaaaataagagatccagtaaacaataaaccggggtatatgcgacagtacttagtggcagtaaatgaaataaatcaaatgaagttaaatgaaatgaaaataaatgaaataggaccaaaaacggtaaagaaatgaaagaaaggggatggaataagtgaaagtaaaacaatcagaaaaggggaatcttctaaatactaacaaaaaataccaagatgaaggtgaaagatcaataaaaagatgattcctctcttccccattctactaaatgggcaattccatggtccaatattcattctatatagatgatgatgccttatttaattatttttcctaattaagtaatttttagtttcccactgaacaattttatattacgtaatatattgtgaaattttaattttcatgtagtgaatcgattttgccactaatttgacaatgttgttgtatgggtagcacagtgggtaatcatatttaatggctacaaaattgaaatcctgtatgtaaatatgttagtagttagtagtaaaaatctatagcaaaaataaaaacaattgaatattaaaaccaaggcacattcattttacccctgagtggcggttacagatcaaaaacttgatctaaaaaagatgatacaatcataaaagtcataatattaaaatattcggtatctgcttatcatagtactgtactttatatgttgtatctttggtatcaattgatataaaactaatacaaaaagaagatagaagaacagttaaaatggaaaaagcagattttctgagcagcccacctccaatatcaaagaaagcgaaattgaaaaatatccaaatttcttacgtaatttaatttttcgattgacgataatacacacattgtggttttaagaataataatttaagttataaatgatataaacaaacagaaatacaaaatgtaaatgaataataaaaattttaatatatgaataataaaaatagtgaatacaaactagcgtcctattaacttaaactttagctgcaagttcctctaagagacgataatctctcttttcaattgaaccattacctggtaatctggtttcattcattaaataaacatcaacttcacgtgcacattgtctaccttcttgaataccccaaacaactaatgattgacctcttctacaatcacctgcagtgaaaacattagatgattcttcaatttgatatgatgtagattcatgagttgcaattgtacctctcttagttctttcaacattcaaattatctgattctggaccaatgaaacccatagataataaaacaatatcagctgggaaaaattcttcagaacctggaatttcttgcatttgccatgcaccagaatctgatctcttccattcaacacgaacagtcttaatacctttaacattaccttcaccgtcatcaacgaattccttagataaaatacaatattctcttggatctttaccataatgttccttaacttcagtatgaccataatcaactctgaaaattcttggccattgtggccatggattatccttagctctttctgctggtggatgtggtaataattcaaaattaacaattgatttagcaccatgtctagttgctgtacctaaacaatcattaccagtatcaccaccaccaatgacaataacatttttaccttcaatggttgctctaatagtttcaagatcattttctaataatgctttggtatttgcagttaataaagtcattgcaaaatcaatgttctttaattctctacctggaatctttaaatctcttggaatggttgaaccaatggctaaaataacagcatcattttgtttctttaattcatctaatgtaatatcttcaccaatagtagtactagtaatgaatgaaataccttcagcttccattaaatcaactcttctttgaataacacccttatctaatttcatgtttggaataccatacattaataaaccacccaatctatctgatctttcataaactgtaacagtatgacctgccttatttaattgatcagcagctgctaaacctgaaggacctgaaccaatgactgcaacttttttaccggttctaatctttggtggagttggaacaatccaaccttccttgaatgcatgatcaataataccagcttcaatagatttaataccaacaggtgcattacctgaaacattaacaacacaggcaccttcacatggagcaggacaaattctaccagtaaattcagggaaattattagtcatcagtaatctttgtaatgcatcataccatctatctctgaaaactaattcgttccattttggaataatattagaaattggacaaccagtatcagattgacagaatggaataccacaatcaatacatctagcagtttggaattttaattcatcctttgttaatcttgaagataattctttccaatcttgaagtcttgatttaactggtctgtatttttcatgtcttctagagtatttaatgaaaccaccaactttatctaatttaacagctttggattcctctgcttcaatatcaatcattgtatcttctaaatctaaaactttaggttcatgtttcttagttggttttggcttagagaattcaccaccagtaatatcagcttcaggatcttccttaatagttgagaaataacttgaagcttctttcttctttgattcttcaagtttcttggctttttcttctaaaactttcttatattcaaatggtaaaactttaacgaattttttcaggaatctattgaaatcattcaaaattcttaatgcaatttcagaattggtataatgtctatgatcttctaataaacctcttaagaaggcaatttctgatggatcagttaaagtagataattcaactaattctttattaactttttgatcaaaatcttgagccatatccaaaacatatgcaataccaccggacataccagcagcaaaattacgaccaactttacctaaaacaacaactctaccaccagtcatatattcacaaccgtgatcaccagtaccttcaacaactgcataagcaccagaatttctaactgcaaatctttcagctgcaatacctctaaagaaggcagtaccagaagtagcaccatataaacatgtattaccaataataatgttttcttcagctttaaatgttgaatcttttggagggtaaacaattaatctaccaccagacaaacctttaccaacataatcattacaatcaccttctaattctaaagtaatacctgatgctaagaatgcaccaaatgattgacctgcagaacctttaatatttacatgaatggtatcatgaggtaaagaagttggaccaaatttcttagaacatctgtatgataatgtagtaccaatagctctatcagtgttaatagcttcagcttcgatagtaacaggtaaacctttatccagagtaacttcagcttcatcaattaatttattatctaatctgacatgtaatctatgatcttgtttcttttcacacttagttgcaacaccaggtctaattgtatgagcaggagttaaaattggtgataaatcaatattagcatttttagttgttcttaaatcttctctgacatataatttttcagctctaccaaccatttcatcaatagttctaaaacctaattttgccataatacctcttaattcattagcaacataatagaagaaattaatgacatgttctggagtacccttgaattgttctcttaaaattggattttgagttgcaataccgactggacaagtatttgtatgacatttacggttataaacacaacccattgcaattaatggtgcagtagcaaacccccattcttcagcacctaataaacaagcaactgcaatatctctaccagttttcagttgaccatcagtttgaacaacaactctacctcttaaatcgtttaagactaaagtttgatgagtttcagctaaacctaattcccatggtaaacctgcatatttaatacctgtccatcttgcagcacctgtaccaccatcatgaccagaaactaaaatatgatcagccttagcctttgcaacacctgctgcaataataccaacaccaacttcagagactaatttaacagaaactctagctcttggattagaacattttaaatcataaattaattgctttaaatcttcaatagaataaatatcatgatgaggaggtggagaaattaaaccaacaccaggagttgaatgtcttgttttagcaattgattcagaaactttataaccaggtaattcaccaccttcaccgggttttgcaccttgagccattttaatttgtaattcatcagcatcagataaataatatgatgtaacaccaaatctaccagatgcaatttgtttaattgaagatctcattgaatcaccattatctgaaggttttgatctttcaacatcttcaccaccttcaccagtatttgatttaccacctaatctattcattgcaactgctaaggttgaatgtgcttccattgaaattgaaccatatgacattgcaccagtacaaaatcttctaacaatttcagtccatggttcaacttgatcaattggaacagaattagaattttcaaaatcaaaatctagtaaacctcttaatgtacaatttttaattgaatcatattcctttttagagtaagcttcataagctttattatttttatttctaacagcatcttgaatattagcaactgctgctggttcattaatatgtgattcaccaccatctctccaatgatattcaccagattcaggtaatccctttggtttaatggtatctctatttggataacccatttcatgtaatgaaaatgcatcttgtgcaatatattcaaatgtaacacccttaattctagatgctgtacctgcaaaacatctatcaataacagaattatcaacacctaaagcttcaaaaatttgagcacctttatatgatgctaaagttgaaatacccattttagacataactttaagaataccatcatcaattgcatgtctataattttcaataatttctctattagtgaattctttggttaataatttttcattatttaatttaatgagtgaatccattgctaaataaggattaataccatcaacaccataaccaactaaacaacagaaatgatgaacttctcttgcttcagcagtttcaacaataattgcaactttagatctttgcttttgtctaactaaatgatgatgaactgcacctgatgcaattaatgcagaaactgcaattttagttgcacataagtttctatcagataaaataataatttgagaatcatcaacaattgccttagttgcttctgcacaaatcctatctaaagcttcagtataaccagttaacccttcagatttatcgaatgtaatatcaatattagtaacattccattttggtacaactttatttatttcctttaatgctaataattcatcatttgataaaattggtgatgacatttttaatctattacattgtaaaggattcatttctaataaattaccttgaggaccaacataacattctaatgacataacaattttttctctaattggatcgattggagggttagtaacttgagcaaataattgtctaaaataatcatagattaatcttggttgctcagataaacaagctaaagctgaatcattacccatagatcctaaaggttccttaccaacatttaccattggaactaaaattgataaaacttgttctaaagtataaccatttgctaataatttaggatcatcctttaatttaacatctgaatcaactttagtttgtaaactaatacctcttgaatttaatttagtaattaattcaggaattgtaatcatatttgataaaatccaagctttaaaatcaaatctatttgcaacttgtctctttaattctctatcatcaacaattctaccttccttagtatcaactaataacattctaccaggatgtaatctaccctttgtgacaatttttttagattcaattggaataacaccaacttcagaggcacaaatcattatatcatcagttgtaacataatatctacaaggtcttaaaccatttctatctaaattagcaccacagaatctaccatctgcaaaagtgaataaagcaggaccatcccaaggttccattaaacaagctgcccattcatagaaagctttcttctttggatccatatgttcattattttgccaagcttcaggaactaataacataacagcttcaggtaatgataaaacaccatttataactaaaatttccaaaacattatctaaagcggcagaatctgaaccaccttcttcaataattggatataatttatccatatcatcaccaaaaagttttgaagacataacaccttctcttgctctcatccaatttttattacctctaagagtattaatttcaccattatgagctgcccatcttaaaggttgagctctatcccaagatgggaaagtatttgttgagaatcttgaatgaactaaagcaaaatgacattcataatcagcattaactaaatcatgatagtaagagtaaacttgaacaggaactaattgacctttataaacaatatttttatttgaaagtgaacaaatatagaaccaattatgtaaaccaattgtatgagttgcttgttttcttaatatatataattgtttttcgaataatttttgatatttagattcgaattcatcatttgatatttcaattggttttgaatctgtaccataagcatcctttaagacaactaaaggttgaataatttgaggttctcttgataaagcagcaggacctaaaattgatgaatcaacaggtacatttctccaacctaaaactcttaaacctaaagaattagcaatattttcaaaagttttctttgatttttcataaattgaatcatctttcttgaagaataaattaccaactgcatattgacctaattcaggtaattcaacatcacaatgatatttaaattctcttttcataaatttatgaggaattgaagtcataacacctgcaccatcaccatctcttgcatctgaaccaactgcacctctatgcgtcatattacaaagaaggtattttgcatcagagataattttatgggatgcatcacccttaatatgacaagcgaaacctatattatattaatattatcatatatgttagtataatgtattaaaagaagaaaagaaaaaaagcaagttttgttttgttttgtaatacataccaacaccacaattatccttttcgtattcagggttatataaacctttttgagttggtaaagttgaagcccaagatttattttctggaacttcatcatatttatagattgaatattgttcaacatcatcaccagatgagattgatgaagcagatgatgatgaaattgaaatatcatttgatttattatcggagtactccgagtattcaaggagtggatctgatttaattatagccatttaatctatgcgataagatatattataaagaaaatgagattaatatatagtataacgatgattacttatcaatagatacaaagcgtgtacccaaaagaagagaagcaagagagtatatatcaaagaccaatttaaaagtcaattaaaagtcatttaatttgcaatgtccattcagttgtgggatgatgcttctctttatagcaaaaaaaaccattgttcaaattacgtaatgactttcccttattaaagactaaacacccccgcttttctctaatcgcaccaatgagagggctggaattactaactgttattcgttatcgtattatgttgattatattatatgatatttatattctatctatctaggactatataaactacatgtctattcctcatcttcctctgcttcctctgatgcctctaatccacccgcttcaggttcaacaacactttcaccatatccacgtttatattttctagcaatacgactcacacgtccatatttctttgcttcttcaactgctctattttgtaaatcatgaatttcttctttaaatgatttttgtactgtagcattactaaatacatcccacatctttaatcctccattattactacctccaataattaaattacctgaaacttcaatttcatctgcaaatgaactattcaatatattaccacatccaaaatctttacttaatatcatacgtggtttattatctttaacattccaaactttaacaactttttcacccattgcacctgttgcaattaatcctggaatttccttattactacttaatgtactaataccggaatcatgtgcatgcaatgtccataatggtttttcatcatctttacgaatatcataacaataaatattacctgaatcacatccacccattacataatattcacccatcttagaaatactttcaacttcttcaccatattcactaccacatgaaaatttcttattattacttgaaacatcatctaatctaacatcacttaatctcatataaccatcataaccacctgtaagtaataatgatccaccttcaacatcattaccattattattgaaccataaactacttgaaactgtcttaccattatgtaatccttcaatacttttattaactttacaattactcaaatcccataatttaactgtactatctgctgaagtggaacataaaacatttctaaaaatatgattatgagataatgaaacaactgcatcggtatgacatgttgaactaatcttattagttttcttcttcttattaccctttttacccttaccaccaacatttttggcactccattctgcatattcattttcacctaatataacatcaggaaatgctttatcaatacaatctaaattccaaatttcaatagttggttcaaatgtaccaatagctgcaaaattaccaatattactaacatcattttcaccgtttggtttaaaactcatccattcaacacataatgggaatgatggtaacattaaatcatgatgaatatataaattaccttcacgaaccataccacgtttaacatcttcatcaatttttttctcttcttcagctgcttcttcatcttcaggtcctaatgcacctgcaccatcatcataaacataaacatctaaatatgaaacatcatcctcagttctagttgcaagaattaaattatcagttggataaatttgtaattctgccttaacttcattttcttcctcttcagttggtaattgtaaataatgatcttcttcaccttcaacaaattcaacatcttcatcttcatcttcttcacccccattaccactttgtttctttgcaactttaatatattttgctgcactattacttaatcctgggaacataacaattttttcaccatcttcattatcttcatcatcataatgttcaaaatcatattcctttaaatcatcatcaatatcaatttgatcctttaatttattagaattaatagtttcttctgtttcttcctcaatttcaatttcaatatcttcatcaccttcaacttgttcagcattttcaagatctgccttagcgtcttgtaaatttaaacttgacatagcttcaattctagccatttcttcatcatttaattcataagtttctggaaattcactggcaataccccttggaacccatgctgttgcagaaatcatcctcgatattcaaacaatttattaaactaacgatttaaagtaaattttaaaaaaaaaattattttaaaacaaaattattcatgaaaaatttcttagggaaaaaaaaatatttttttttcattcgaattttttttctgaggggccgttaaaaaggaaacatgattttcttttgcattagctacttccatttatggtaattcattatttctacgtttagcaattataaagtatttctataaaattttattctatttttattctatttagcaaagtttcttatacatttgattatcttcttatagcacggacaattggatcattccagatagatggaccatagataggatggttctgtatgcataaattagcaggggagatagtcattgctctaggaccaagtggaataccacctgggatcatatgatttggtctagcatacacaccaatattcatatcattgttagtatctcttattttgtatggcgcagttgggatttttccatttatttttttgttgttgttgttatttgtattatttgtattattccaatttgaagttaatgatggggcgggatatgtcatataaaattgaacagtttctttattaacattcaaactgttactattacctgtattggtagtattggtagcatttgttttcattgaagatgtagatgatttttctgatgtacttatagtattattgtgactttcactttctgtgattgttgaaccaaatctctctgatgaacttactctattctcttcttcatctttcttattgagtttattttgaatagctaatttaaaagttgtttgaatatctcgtttggtttcctttttgttacaactaatatttttcttgttttctgttacttctaaacttatctcactgagacctgctaaaacattctttgtatcaacttttgaagctttcttggtattctcatgactaattttaacaactttgttttgagttgctttttcctttgtgggttttggtgtgttcataagaaaagatggtattaaaggtattgattgtgtatcatttatcttagttggttccatttttggagttgaagtcagtggtgcttcatttttagctgttgattggaatacatctttgaaaaataattgttgatcaaaaatattattattattattaaatcctcttttattattctgagacttagatattggtgaatttgaacaataactgtttgtttctggaaaaaaattacttcttggtttaggtttgatattcaagttgccattggaatctctctttaaatttgatcttacctttgatatcatttctccttctataatggtcttcctcatgatttttgtgtatttatgaaaaacaaatgaagcaataatgaaaatacagaaatataaatatctttgtgtttgctttttaatttgaataatttctgaaattgactcatctaaaccatttgagtttacaatacattctttaactgcaataagtatattttgatccttagttattaatggaatcatatcaagacatctataatttaaaaattgttagtattcagttaataataatagaaaaaaaaatctttatacttactttccaaaactttcccttgctaatgaactaaaatttgctttggaaactgataacaatctttccttatgtaatgttaagcatcctaaacttgtaccatcttgattaactgaaacggggacaaattcatttgaatatttatcccatccggaacatttacaaatattaccataagaaacttggaaaatagctggaattgtgtattcaccatttaatgagaattgaaagaattgtaaatagacaatcaataagaagattgctattatggggacaaaacaagtaaaaaaagttgaagtattcggcagcatgggtttattatattgctacaatctacaatataaggtagttctactcaatgtatactgcttaatcaacaaataccagtaaacaatacaacaatgtcaacataaaaggaaatgaaaatagaagtcgtaaataaaaagtaagggaaaaaaggagtaaatttatagataacaaaaaactatttcactttcccttatctctactatgtgttttttttacactttttgttataataatttctaaaacgtaaagttctttttaaacaaacaggaaatacaaaaatacagttatatataaatataaataaaaatggggtgtaacagaatgtataatattaacagagattattggtacttttattttgaaagcttttgtgcatattcagctgccttagccttaacgtaatcttgagatttttcatcaccttgagtttcttcaaaacttaaccatttagcaaagaagaatttagcttgctttctagttaatttcttttcaataactctttcaaataattcatcgactttactcttttcattagctttaatttcttgatcaatataaacattccataaatcaattctctttggaacatctgataataaaccttcaaataatgaacgaccttgttctggatctcccttttggaattctaattgtgcaaattttctaacaacattgacatgatctctctttggtaaaacttgtaatgcctttgcaagtattttatgtgcttcttcattctttttaccatcaattaaaaagttaccatatgaaacccaagctgatggattctttgaaccaaatttcttacataaaacattgaataatgaattagcttcactgaatttttcggatgcgatataaattgcaacaagtttttgatgcattgtatttgcatccatatattgacaagatctcttgaaaactgcatctaatgtttcatcatcaccaaatgaattctccaaatttaataatgcaatccaaatattcatcttttgttgttcttctctaaaattaatagtctttaatgctctttcagcaatttctctagctttttcaatttcacttaattgaagttggaatgacatatattgaatccataaaattgaagaatttggattaccaactaataatctttcaaaatcagaaatggattgtggtgatctagtatttaatttatcagttttatcttcaacttcagcagctttagccttagatttcttagatttcttattaacttcgttattgaattcttcctcttcatcagatgattcatcttccttagcttgtgctaaaatagatgcagtccaatcaaaacctgtagacaaaccattagttgaaagaccttcgcttgattcattattattagtttcttcttcatcatcactttcttctgcttcttcgtcttcactatcattttctggtccatcttccattttttcatcatcagaatcttcattcatttcaacatcattattttcaccatcttccataacgacatcttcgtcttcttcttcatcttcaccatctttgaagtatgatgctttcatacctaatgataattgttttttatcagcattgatttctaaaatcttaaccttaactctttcaccttcactgaaaatatcttcagcatttttaattggtgaatcagtaatttcagaacgatgacataaacctgaaacattatcagtaccatctaatctaacaaaggcaccatattcttcaactttcttaattgtaccttcataaatttcaccaactttcaaatcagcaaatgattttaagttctttaaatcaccactaacaacagactcctttaatgacattaaaactctaccttcagattgtgattcaagtatacgacctttaactgattgattgacattgaataattttttccaatccttaatgaaactatcagataaatcagagacacgaactaatgcatagacagatctacctaaatcaacaaataaaccagaattggtaattttattaatgtaacctctaacaatatcaccacgtttaacatcttcaacagaattaattaatctatcctttggatttggaccacgtaatgaaacgtacagttttctatcagttgaaacaacagttgcagtatggaattcaccaacatggaaaacatcacttaattttaaagtataatcatctaaagcatcggtaaccattgaaacagcagtaatattttcacctaatgaaactaaaacagaattatctctaacattcaaaactaatgatggtaaaatatcaccaactttaatatcatctgaagatttaatcatctttgaacgaccagaaacattgattgcgtaatgatcaatatcaacatttataaccttagcaggaacaatagtaccaactttaaattcattttcaaaattagataatttagaaatatcatcagtaacatcaacaaatgacattttagccttttgagctgcagatatattataccagaaataaccagaatttatacttaaaatgtaacctaaaacttcttgaccttccttaatatcattaaatgataatggatatgctgaatcagtggatttcaaactagatggtttaattgataattcaactaaattagttgaggattttttagaatgaataaatttttgcttttcaacatcaaaataaccaattactttaacttgatcaagttttttaccaagattaaacttagaaagaggatgtttcaaatctttgatatctttgatatcatcataaatttcagttatatcaatacgaccttcttgattatcagataatttaactagtaaatgggtatcttcaattgatttaatagtacctttagtaattttaccaacagaataatcacctaaagttttaattgatttatcaactggattaactgcagcttcctttgaattagcagtttcgactaataatgaaagtaagaatcttttattattttcatcagcattaacaactgaacaactaactgattgatctggagtgaaaacggtagttaaatcggtaattttcttttgagaagcaaatcttggaatgactaaaccagttaaattattactgaatgaaacaaaaacacctgatggaatgacagttttaacataaccatgtaagattttatcagagattgaaatatcttcatatgaagttggtaagagaccattctttgcatctttaattaatgaaggtttagcagttaaaacaacacctcttttacgattatcaatttgtaaaataagtgcttcaattttttcaccaacttttaatttttttaattgatttctaccaagatcagcaggaccatcagctaaatgaccaactttaataacaccattaatattttgaccaccaattttaacaagaacttcttctctttgcttttcaaggatttctgcttcaacaatagatttacctggaattaaatcttttaaactattcaattgatcttctgacatatcacctgaaattcttaaactgactaaacatttagattgttcagcatcaaatgaaacaattctaactttaactgtttgacctaattttaaataatcacctgcatttttaacaaaagtttcacttatttctgcatttggtaagaaagcagatacattaccaaagaatgaaacaacacaaccggatggtaagattttttgaacagttgcaagagcacgtttattttcagataaatcactataagttttaacaatttcatcatcttctgcactaactaatgatcttttcaaagttgcagtgattgttgattttgaaccataatttgaaacatttaaaattctagctttaactttagaaccgattttgaattttctttcagggtaaactaatttaatatcactaatttggaattctggtacagttgcatggaaattattttcaagttgaagaacgataccttcagaactaactttttcaacaacacaggtaactttctgtccaactggaatatcatttgctcttataaaattaacatcaatttgttctttatctaatgttaaaatataggtgttatcaaacattgagtaatctaatattcttgatttatgagtggaaccaattttaaaatctaagtctaaatctgcacctttagtaactcttgttctatgaacttgacctggaatttcacctgacattaaatcaacaaagaagaaattatttgatttacctttaactgtaacattatcgagtgtatgaccaattggaaaagcttctaatgcatctttacctgcgtaggttaaactttgatgagatggtaaaatggaaatagataatttatattcagcatttttattatatgaggcaataattctagcctttaagattgaaccaactgaataattatgttttatttcatcaggactttgtaaacaattcatatgttgtaaagttaaggaagcatcacacattgaaagaactttacataataaaccattttcagtaactttttcaataactgcgtcaacaaacataccaggtaataaagcagtaacagctgagactgatgcaaccattggttgttttttgatatttgcaattggaattttacaagtgacagttcttgaatttatctttgcaacagtgacaagaataactgaacctatttctattttggatgaaagggatgataattccttcttggatatgaaaccagtatgactgaattttttaccaaattttaagatagcaccatgatcttcaattgatgatacggatgcttgaataatggcattttcaataagatcttcactttcggacatttcactgttgactaattcaggttcaatagataattcaattcttttctttaatttttcctttgaatttggaacaaccttagctcttagatattgaccaataaaaaatctttcatttaaggatgggaaatcaatttgttgttttttatcagttgaagttttcttatcattatcttcatcatcgctatccatttcttcatcactgtcactgtctgattcttcttgatcatcatatttttctaatatgtcaactaattcagatgaaatattagtaattgggatataaccaactaaattatctgcaagagagagaacaatttccattttattgatttgttgaaccatacctaaaacgtatgaaccagggtttaagatattatatgataatgtatcaatagtaattttatcgatatttttcttttcatcatcctcttgttcatccttagataaaagattcaattttttagatttcttattattagttttagatttcttcttagaaggttcgtcagatttagcagcttgttcgaaaagaacatccctcttagcttcatttgcaacttccttcatttccattggagttaaaatagatccaccacctcttgggaaggcgatttcagcagcggatgaaagcaaggatttttgttccttgttatcagggtcttctcttgttctctttggtgccattgtcgtagataaagaggaagcctgtgctatgttaaataataaatctaacaaatgaaaagtctaactaagtaaaatagaaaaaataaaaattttttttcatgtagtaaaagtgaaattaaaatttcatcactgaaaaaaaaatttcagaaaatgaaaaaagcggcgattttctttgacatgaaatttaccactttagagaatttcatgtagtataaatggttcattctggtcatttatgttgctttatttgcacttatatacagatattgcacatagtaagatactagaactagtagagataataccctttctcatcttttgattttaaaacctttgaaaaatcttctcattccgttttgtttccgtctcatttatctagatatagtatcaggggtatcatctccaatactgacaaaagttatacattaaaaacagtttatcatatccatccacagcgtcaattttccatttctaattcaatcaaggcaaaacatatagcaatgtcattttccctatcagtaatctcacatccaacttcagatatttctaaaccagctctctttctcgaagataaaagtacaggtgatagaacaattattggtaatgtcccagcaggtttacagagacaatgtaatgagaaaaaatataggataagtcgattgaaaaatatctttcttacaggtgtgctttcttggaaggctgtatctggattacctgggttcattttaactgttagtgatcaaggtgttaaaaaattaggtatttatcatagtggtaataagcttattcaatatatggtttcatgttggagatattttgttttcagatttggaatgaacttaaatatagaagatgtaaatcaatctcttgaaagagatagtgttaaatatatcccaatcaatatacattcaaatataaattatggatctaatgaaaatgatcataatctagttgaccatgcaaaattaaatcaaatggtttcaaatatattccctatacaggcaaatccttcaaatactacaaattccaagaaaattactaatgttacattacctaaatcaattataaatccaaaagtttccactaattggataatatatccaaaaccaacaagaggtaaatttcttgttaataatgctaaaagtttaggttgtgatttcactcatttcaagaaattatgtaataatgaagaagtcgtcttggagaatggtacaattgttaaacctgaacaagttctagaaccaacaagatattttgcacctatattagtattggatatcccatctgaagaatacatggaaaatttcattaatcacgattggaaaaaggattgtccggataatttatcttatggtatggtattccatttctttggtgaatcaattcaagatccattatcaaatgaaaaatatattcgatttattaaatcttttggtccttctacaatgcatttaataagtcataaatcctattgtcctaacagtttaaatttccataaaacatttagagtatcattaaaatggaaatcattaataccgaatttcttcccattacctaaatggacaaataaatcaactcttaaaataaataatgaagatttaactaatgttattccattgatatctggacaacaattcttattaactccttcaaatcttactcaaaataataatatagcaagtggtgaaaacatcccattatttgagaagaaagattgtaatgatatatatgatatggaaatcaaacctctagaacttaaagatgttgctagtagagaacaatttaatacaatgattgatgaaagtaataataataatgtacaagttttaaaaacttcggtcgatttaaataaatcattaaaggatcaagtcgatactttagtattgggtacaggttctgcattaccatccactgttagaaacgttctttcaaatattgttagaataccatatgttaaagatgatggcacgagcggttacagatcaattcttttagatggtggggaaaattcatttggtacattacgtagaatatataaacaagaagaagttgaaatgttattggatgaattgaaaatggtttatttatcacatttacatgcagatcatcatttaggtattgttgattttataagagaatggaattcaagacaagaatttaaatttggtgttaatgaaagatttgagaaattgattgttattgcaccatggcaatatgaatatttccttcaagaattaaatagagttgatccatttattaatactgattttattgtttatatctcatgtgaggaatttatgcttggtaaaactttcccaacatcaaaacaatttgaaattgaagaaattgataatttggattcaatcccatctgaagaggtggaatttgttaaagatattaataaatctgaatttgtttattcaactttaggtatggatgaaattaaaacatgtgctgcacaacattgtgatttctcatactctgttagtatgtcattcaaattaaacattgattcaaatgataattcatctgataatattttcaaaatttcatattcgggtgatacaagaccaaagtttgtatttacacatattggtgaaaattcagatttactcattcatgaatccacacttgaagatgaaaaattcaaagatgcatttgacaaaaggcattcaactacatctgaagctgttcatgttggtatcttaatgaaggctaagaaaattttattgacacatttctcacaaagatataaatcatttacatgttctgatgttgtttataagagacttgagaatccaataaccaaggatgatctcattgatggtgatgacaattctgatagtccactactttctacaacaactttcaaggagtattatgcagaaattactaataatcctgaacttgcaattgagattaaatcacctatattttccaaagaattagatattgaaactagagctgccgctggatctattgaaatactttttgcatttgataatatgaagatccaatatgatgaattccatattcaaagaaaagttttagaatctcaaggagctaatttggaaaaactctttggtactgaagaagaggaggaagagataaaggaagatgtagaggataaatcttcaaagaaagaaaccaaatctaagaaaaagaaaagtaattctggtaacggaaataaaaagcaaaaagtttgattattaagaacatgaaatattgtttcacattgtatatagaaaattataataattgtataatatgttaagtaaatttaacttaaatcaatccattgatggtgttaatcccataagtgcaaatttcaaggcattatcatcatcaacgagagatatgtattgtttaactcttttgctaatagtatcatcggctaataaatcactattaacatcacagttttcgtttaacttcactggaccgtttcttctaccatctaattcgtatatagtatcacccttcttaacgaagcaaacaaaatgtaaatctatattatcttcagcagctggagcttcagtctgaccctgttccccaaaagaagtgtacatatctttagcaatattttgaactaattttacaggatctgaattattctgtaaaatttcactacgaaatttatcaactggtgaactttgaactattaaacctctaggtatattcaatagtgaatgtaataaagcatataaaccacaagcatttttaacaacttgtttcaaccaaacaatttgtgaattatctatattttcaacaggttcagagtctttgaattgttcatatttctcagttattgggaaaagtaatataattgcgtgtattggccttggtataaatgagataagatcaggatcatctaatgagtaaatatcagtgaagtttaataatggagataatcctaatttacttgcaaattcagtaaatatttcaggatttgattctagtggtataacagcgtcaattgatggttgttcactcataattggtgtaatttattgtcaagtgtagaagatactaatgcctattaacctaatcagtggggattgtcccccgggtgaaataattttgatggcagcgctgggtgaaatttcaatttttttaacttggggctgttcttctgagtggacttttctttctttctctctgggtggcttctaatgttaattgtttgtattaagtgcaatcttaatggcattgtaatatggagaacgttcggagaatctttgaaagcttgaatatatcttatttctttcattcaaacgatttatacctttaatcatggaataataattcaattttgccattcagggggttgaaatgattttttctcctttttacaatcaattgtttgcatttttttcccaggatttcttctactaactactgccaaactcaaaaacagcatagcaactttatatccatccaatacgagtatccgaatagttaacaactgataaattacataaaatttgtggcaaaatcacttgattaattaacatgtcaaaatcagaaaattgtgttacgtaatcaaaaaaatgagggaaactaaaaattacctaattaggaaaaataattaaataaggcatcatcatctatatagaatgaatattggaccatggaattgcccatttagtagaatggggaagagaggaatcatctttttattgatctttcaccttcatcttggtattttttgttactatttagaagattccccttttctgattgttttactttcacttattccatcccctttctttcatttctttaccgtttttggtcctatttcatttattttcatttcatttaacttcatttgatttatttcatttactgccactaagtactgtcgcatataccccggtttattgtttactggatctcttatttttgaattaaaaagtttccgaacccaatttaatttgaatcatataatttaattataagaaagttattcactaagtttaataagccaattcattaaagcatttattactgattaatacattcattattttagtttactattttaataatgcatttctcatcagagtgttttaaagttcaaaatgccatattggttcatgtagctacaactgcattaactctttatggtactagtcaatttattgaagctagaaaatctaattatgctaacttcaaaaagcgtgatgtttatcttcgtgctaaaactattttaagaagacaattgatgatgatatatcattggtccttaactagatactgtattgaaaacccattaagaattaaacaaattagaaaagatgcttttaaaatttctatggataattttgatgttacaattgaagaaattaataaatatattgataatcctaaatttttatggagattctctgctagaaattatgacttctttgttacattctttaaatctcatagaaagtctaaattgttctatagtagatttgaaactgctgatattgatgatagtcctttggtagattatgttaaaccattaaataattatcttaaggataaattaaaaaaaacttttaattatgatattacttcaatgaaaagatattataattatgatactgattatattctcaactttatgaaaacacatttgcaatcaataaatgaatatgaatctgcagaattcttatattctgatgactattatttacatgaagttcaacctgatgctaaatatgaagattttgtttgtcatcttttatgtggtctgtcaagtaagaaaaattattcaccacttcttaattggcatattgaaaatagattatttcaaaaggctaaaaagatttcagataatccaaatatcaatactattctgaaattcaaacttgcaaatttagcaaaattaaaaacttcaaaaattctaagtgatgaattcaaattatatagtgatttatcacttaaaactttaaaatttgaccaaggtcatcttgttgaaaaggttcaacctgttcaatctactgttgatgaaaattcaactactgtcaatcctgtcaatcctgttaaccctgtcaaaacaatcaatcaattaaatcctgtcaactcaccaaataaaccaaaccttaaaaaaattaaaaatatcaattttgatgtttcacctaaatcattaaataaggtacctgatgatcttatgcatgcttatgattttatgtttccagaaaaaaatcaaaatcctgcattaagacttgaatgtatcaaagaaattgttgcatttagaagaaaatcatttcaaacaactcatagattttttcatactgattggcttcatgaatatagaatgaaagttaacaatattgaaaattcattttataaaattgcacttaagacatttggttctaaatgtaatatgcaattctttagatttgatgataagcatggtgtttctgttagaactggttgggcagttccttgccctgtggaattaagaaataaaatttcaaaaatatttcttgaaagtgcttttagtgatgaagaagattatgaaacagaaatgttaaaattatatgaagaatgtaaagatggttttaaatatcgttttaatccaactattttaattgaagaacctgatgatgatcaaacttataattttagatatgattgttcatttggtgctaaggttaatgattatggctttaatttttctgccatgtttgatcctgaattattagattatgattttacttcaactgagaatactattgtggctgatgatttccctccatttactcaatttcatctcagaaaatttgaagtttttcaaaatcaatgtattgatggacttggttatactggtgttaatgatactattaattcacttttacatggtaatttaagtattgttgatgatacaattagttataaaagtgtaaccaataatccttatcaagaaatcattgatgatgatagattaacacaactttcacttaaaacaaaatttaaattgaaatttgatgataaagattatgatgaagatgaaggtggtagtggtggtggtaaagatgctaatggtgttactgatgctgatggtgttaaaggtgctgatggtgctaatgatgctaaaggtgttgatgattctattggtgctgagtgtgttggtgatgttgatgatagtaatggagctggagatgttaaggatattggtgatactggtggttctggaggtgctaaagatgctaaaggtgtcaaagatgttaaagatgttaaaggtgttacaggtgttaaaggtgctaaaggtgctaaaggtgctgatgttgatgaaaaaatggtaaaccaaattaaatctgatgataaccctgctgtttcaaatgataaaattactaaaccgccaataaactcattaattactcgttccactagttccaattctcctccaaatatttttaaccaaaaagacattaataaatcaacttctaagaatgttaaaatagaatcaagtgataaaacttcattaatcaaatctgctgatgctattattgatgaaaaggcttcacctaatgaacattttaataccccaaaagaagtcgatccaaattccaatttagctgtaaaagataagattaatgaagttgaaccaaataaatcattatcacctgcaactgatgatattttacttttcattccacctatggttaaaaaaaagttaaatgagggaattgatgagagatacaaatttgaatttgttgactttttagggatttttattcgtggtagtaagaattacattaaaagtagaaaggtaattgtcaaagatttgaaaattgcatttaatgctctgtttgaggtactctacaaggatgttaaacgtgttgaaaaaaaatggaaactttttgactcttatttaacaattgatgatgctgcaaacagatctgataaaatcattccatttcaagctgggaactactatcctggaagtcgtgcaactcaatgtgctgttggatggtatttatgtgcatattatgcaagatttcataaatttggtgtttctaatagagatgcttttttcttgaaggttatggaaattcaaaaaaagtcaaaacatgctgcatatgttctttatttatttgcaagagatagatatgtttcccaattattttatgaatatgaaaaacacttaaaatctactggaagatttaaaggtactccttaccgttttacatatgatctgtattatcataaaattgttgagaaacatggtcttaaaatgctcctcaatcaaaataattaatttgacttatttgaattttggtgttgatttaattggtaatggtatttatgctggttttatcgatgatgttatatcgatgttaatctattcaaaaatttcataataataaaaaattcaaattcaattgaattgaattataataataataataataataataataagaaaaatattcaaagtatatttttcaaattcaaggtttgttttaaatggtgatttggttggtattattgattattttacaggtgttatttctttgatttactgaatattaaacttttgacagggggtgatattcaatatgtatttcaaaaatcctttgatgagagtgcttagacccagtatttgacaggtactgggagctacatcaaagttgtttgcttttctcgttgtttgttctttgttctttgttcttttaaaaaaataaaaattggtgtgttgaaatattaaatgtatgattttatccattattgttagtttcctttttatttctcttatatgttggtggaaaaatcattgtgtcgattaaaataattttaaattattttgatcaataaatattataaaattttatatagtttatgaccgtttatatttctttcttctctgtttaattaatacacacaaaaaaaagctaacgctatataattaatcgatgtaattatctttccaagtctacaacacatactttattggttttatggccaccactgacaataacccatctaacaccccttgatgcttctttagttaaagcattgtaaatgttagaaacataacttcttggtgtatctctagcaacacctccaactcttcttttccattcatcagcttgtttaactgatgtaattgcaatcatatctaaaacttcatccttggcttcaacaacaataactggagcatttgacatttgattcattaataatgatgcagctttttgtgaactctcttcaacaatagattgatctcttttattattctttttatttgcattagttgcaaaatttggtactgtgataattttatgattttcatcaaatgcattgatatgtgatggttcaaaactatttgatgtatttgaagtagttgccagactctctgcagaattatcatcaccatttgttttatgaagatttctttcgtaatttatagttgaaaccaattcaaacatatccaattcaaattcagtttttgtttccagatttttgagtctcaatggtttatatctactaggtttatccctactcaatgaagagatgtcagtatgagccttaataaaaagaatcaaattcacattgttttcccttgcttcataaagaatatcatccatagtaagtttgtttttaataacatcagcacttattccatttttccatagctcattcaaaacaaatggagcagtatcttgcagtaaacttgtagtgaaaatactaatcaaaacatcacacttaggagttctccaatcaatttcaatttgtttgttcttttgaaagcttttagcaagctttaaacctctttcaccttgtttaaacatttcttgatactttttcattgaattgaaaagaaaatcccatgctattctcaaaccaactgcattcggtaaactcttcgaatttttatttctagctaagtcttgaataagtccaccatatctaccacctgcgccgatgacagatttagatttttcttcgtgtcttagaacaaacataattccacctttataaaaaggtgcattataacctgtaaatggactaatagaaatggttgatttgactccaaatcctttaagataatcaataaccttttgtaaataattcaaagcagtttcaactctaactaataatggactagtctaacatcaacttacgtaattttgatgcacaattttcaatactcattgcaaaatcaaattgaaccaattcattcaaaactgtacttgaaatattaagttcttgtttcaaaatagttttagcttctttcatggtcttagtatatccaacctcagataatattctagcaaccatcattgtttgagcggattcaataccacaatattccaaaatagtttccagtaaaccacaatgatttagataaattgtaacactagttgctttcaaaaatggaaaaacattaacaatttcagatccaactttaatacattcggcatcatagaatggtaaataatcaactggatcattagcatttataataatatcaaaatcaatttccttgaattttagtggaccagcactttcatcattggcatttgatctataaacacaatctattctataaactttatgagtttttaattttgtctttcctaaaaatcttgcaaatggaagagttaaatcatatggtaattgtaaaactgatcctgaacgatctaaaacttgataaagtgaataatttgagtcatataatggatttttaggaaatattttgcaactattatcatcgaaatgaatagcaccatgtgttttaaatattttttcaagttgtttgacaatttcatcatataataaagcatctcttgtatctggtatttttgaagtatctctgaataataaatccttggcaaaactgtatggttgagaaaacaaaatatttctggcttgatgattccaagcagaggaaggatcaaccaaagcatttaatgcttctttcatcaaatcatcctgttgctgtaccctaatcaaaccactaccaagtaattctctagcggatggtcgcttatctggatcatgatctaaaagtattttaataattttcttctcagtaaacaatcttttggtatcaaaatcatgagggaatacaattgatggtgatcttaaatttctaattgcggtatacctttccattgatgtaccaagaggataaatcatttcaaaaaaaatgataccaactgaatataaatcgaccttttcattataattacctttaccattcaaaacctcatcagcaacatataatgtagtaccaatttcagaagtcaattcatcaacagatttatttaaatcaagcttacttggtgatgtactcattgaacttaaattatgaacatttttagctaatccaaaatcaccaattttgacattttgattttcatcaatgaaaatattaacgggttttaaatctctatgaataataccttgagcatgaatatgagctaaagcttcaagaatttgacgaatagttctccaataattatctgaatccttaggaagaccttgtctaatcaaatctgataatgttctattttcacaatattccatttgaatgaacaaaactgaacgttttttactcttaggtttgatattctttttttcttcttgaactttcactgttacttcaggagtaccaaattcaaacggatcatcatcgagatcacttttcgcatcggcatcatcgtcggcaaaactgtgggaatcttcatcaaaattatcatcttcaagttcatcgtctgaaaatgaaaaatcaatagattggttatgagagccagatataaaatcggtaaaactttgactatttgttctggtatcactatatgtacggccgctttggtttttattttgcccacaatcatcgtcttcttcttcatcctcatcctcttcatcttcttctccatcacttgaatcaattgccgaggaagtcaaagtccatatcatcttctaaccaagcagcaaaatatctaacaacatattgatgatttaatcttgccaacaacataacttcatttaaaattttagataatttatcctcagtatgtctaatcttttttaattgcatataatctaccatctagtctatttcttgccttaacgacttcaccaaaaccacctctacctaaaacaccaacttcttcaaaatcttgtgcatatctagagtaaaatttaggagcaaatgttgacaatccaaatgattctcttttcagtctcctacttgggtttaaagttaattgttgattaccattaacttttgtgttatcattggaattattcaaagttgttgttgataattctaatctgttagagccactagagtaagcatcatttgtagccttgagaattttcatgatttatccaataggttttcaagtggagatacattcaaggataatcttaaaaatttggaagttaataattctaatggatcagggtcttttcttagttttaaattcaaaaatgtttcgtagaaattcataaatagaaccatctaaattaggacaacttaaaaggaaaatcatttggatcttggaattcataaacaatatcagttcctaaaatcatttgtaacaatatcacaccaatatcccaaacatcagttttacgttgaggtttcatatacaatcgactatttttggaatctatacgttcaggtgcaatccatccactaacggagaatggtaggaaatctgaatctgattgttgatttaaatttggataattgtataacatattaattaatgtatacccatatgtaatattggtcaattccaatctagcagattcggttgattccatttgcttaatagatatagaatctaatgtgatacatctatgtatcaaaccatgtttatgtaatttttctaaattttctaataattggattgtccattctctagcaatattaacgttaacatataatatggattgaagtaagtctcccaaagtttccgagtatttagataagattcttactttccaaatgcataaagtttcagtctcatttctggatgatttctttgaagttttcttagcagaagaattatgtaaagattcttcaccatttgacaatatttcctttttctctatatggaaagctataacatcggtggtctttaacaatgagactgcctgtaattctttttctagtgtcaatatagattttttaccctgactagttttccaaaaaggattatttaattcaacttcagttaggagatattgtaaatctttttcaaaaccttttgtatttctaccatatttagttcctattttattttgattagtttcactcaacatttctttaatctgttgatacatgggtgttccctccttaacatatggtttgactaaatattgtttggaaatatcctttaagagaccatttggttgaatgggcacaaatcctgtaattgttctaaattggaaacttacccaacttaaatggatatctattggtctatcgaaaacaaaatagtttgatgtagcagatttttcatcaggaatcatatcacttgtaattgatgctgatctagattcgtcatgtgttacagagtgtgtactatttgatcgcatattattatcatcattttccatatattcttgaaatgaatcattggtctcactactacccttatatctcctcctcatttccatttcaaccatttcacctaacaattcttgttccttctctcgttcagcctctaatttctcttgttcttcctggtgttgttgctctagtttcaatttctcattcaagattcttttctttctctcttcctctaatgaatctgtcttaactccactcttgatttcattcaaataatcgaaaatctcagtataccaagtataaacaattggttggcctttatattcgtttaaagcagtagcacatttctcatgaatagttctcaattgagaatccatcacatttttcacgttcgttattttataaattggagcagataaggggtaagttgcagtgaattcaatagttaaatccaatgaacaaaccttatcatctgatgtatcagttgaaatgtgtaaaataaatttatgaaaaggtttttgattccaagcactctcttttggagtcaaatcctctaatatatctggatatatagcattgataacatcccattcggactgttgttgttcttcaacagattccatgctgtctggtatgttcttcacgtaatttctacaatgaaaaacaatagtctcctatataaaaagcctgaaagactgaattttgaaccactgcaacttcgctgtcattttcaatttgacatgattaacgatccagcttggtgtctttttttcttttctgaatggttgttagttgtatcaattgattgatattctgctgtatatagcagtttagagataaaagtacttcatttgacttaattgaccatgtcaagtttgaaagaaagaaagacagattttgtttcagaccttgttggaggtacaactgcagatatttacattgtgacatcaatttcagcattgtcgtatttagtttggtgtattgtgaaaaagaagagtagtttgtttgataatggtaataataattcattagtttcaacagttattgactttttgctcaattggaataatttactgttttccacaacagtgtatgcaaataatattccattattgattgttcttaatttcattccattgattcctgtgatcttaatgtcatcaaaatcatcatcatctaatgatcaaaagaagagtaataagacgaataaaaatgatagtaataaactagtgagaagagcagttattaatttgaatacattgacatctaaggtattcctaccatttaaaacatacatcacaatttatcgtgcacaaatgatggttattacctgtgtctgtatcatggcggttgatttcaatatttttccaagaagatttggtaaagttgaaacatgggggacaagtttaatggatttaggtgttggttcatttgttttcagtatgggtttaatcagtgctagatcatacattcgtcaaatattcgattcaaaatttaattataccaggacaattattaaaagtttccaaaatagtttaccaattttcattttaggattaattcgttatatcagtgtcaaatcagttgactatcatgaacatgttactgaatatggtaaacattggaatttcttctttacattagcatgtttaccgatattaaatgcaatttttgcaccaataattttcaaaatatcaccattaataacaggtattttaatttcggtattttatgaatattatttaattaataaaggtggtcttgaatttattattgttggtgaaagagatacattttttggtgcaaatagagaaggcatattatcattatgtggatatttcccaattttcttaaatggttttacattaggttcatgtattttaactataattccaattcctggatctagttttcaaaatcggtataagtaaggaaaatttaattaaatcatataataagggtaaacgtggaattagtcaattaaaattaactttcatattatcaatttttttccaattatcttattatatcattgatacatgttacgtttattcagtatctagaagaatggctaatttattatacgttatttgggttagtgcatataattgtacatttttattttatatggattaattgagaaagttatatgtggtagtattgaaattacaattataacagatacgaatgatggtaatgatgatgataaagttgaagttgaaactaatattgaagaattagtatcacaggaatatgttccaaaatcattatctgcaattaatttaaattctttaacattattcttagttgctaatttattaactgggttgattaatttaactactaatacattggatgcaggtcctataaagagtatgggagaattggttttatatgaagtggttcttgctgtccttagtttactactttacgataatgggattgtcttaagataatttagatagtttctaatgtatacaatttatagactgataaatagttattaagaccttttaagggcattaaacctttgttttagatcatccagttcatcaaactgtttgttttgtcttttactaggtggtttggatgttccatctttgtcatctttgccttcatctttgcctccatcttttgtatcatcctcctcttcatcttcctcttcgtcatatttaccttcattgtacaaatctattctataaacatcacttaattcagagatataatcatttacaactgcatcttcatcatctcctcttaattttctaacaatctctacataaattttgtcttctaattctaatttcaattctggtttatcagtatcttgaacctctccctcttctccacttccacttccacttcctctatttcatccttataatcaacttttttaacttcgcccttttcagttggtggtgaattctttaataagtaaggtaaatcaatacatttaactatagctgaagctaattttttcaattctttaacatcagtcacctaaatattcttgagcaacaacaacatttctaataactttagataaacgatcaatttcttgatattgtaattctgaaggaagtttttctctactagcaggtgtattactactcccaaatccaaataatgaccaaccagaaactttctttcctctattattattactaccttcttgtattttagaattaattaaatttaattccctttgtttatctaacattgaagataatgaatgtattgaggattctaaaactgccatttcaccaattaaatcttcccaaacatcagtaggttctatcatcacgtactaattgagcaattctcatacgtaaaatatctaaaccacgttcaaatgatcttgaattgttatctaattgtgataatttttgtaaatctggtataattgatgtttgaattgtatgtgttgataatgcacgagatttcgttaacttaaattcaagtttactcttaggtggtctttactaagatacgtaattgtgtgtctgtttgcatgtttgtttaatgaaagaagatagataagataagataagattcattaattaaaacagtgtagtgtcgaatatatgatgtttcctaattaggtaattccgaagtttggacattacctaattaggaaatattaaaaagaagtaaggtattagatgtattagatgtatttaggaaagtattagatattaggacataaaaaaaactgtattagtctatagatataaaagtagaagagcttttggagttattgaaagatcttatgtttgatggatgtttggtataggttttgccgtgtctgtattttgtctgtgtgggtagtagtgtaacatcatcaattaacgacggactaccctctctactgaaagttggttttgttttggtgtgattgagagtttgtttctcttgttcattagagtgttccatttgttgtaatgacaattttgggtatactggttgagactgttgaaagggggttatttctttaagatagttcaatgagtataaacaatccacattgttcatagtatcatagtcataattataattataatcatctttcaaatcggcgaacggatactgaaccattgaatctatcattatattgatgtcgtgtatgacttaaggttttgaacattagttattattgataatattattactagtagtattagaaacattacccgtctcttccatttcattaccattcattaaaagagatttgcatcgggaatactctatattaaacggctgaaccgtattgaactgaccattatccatattttgaacactattatcaggtgattctccctcaaaacagtccctcaagggacgtcttttcaaagcatacccaccagcatagtcatccacatagcccaccaccatctccactgtcacactctgcaacactacgcttcataccagcagttccagcagaggaaacactttgcaaagaactgtagaaacttctagaaaacgaaagaaattttttcgccagtgtgaaaattgtgacatgaaaaaatatcggagtttataaatataagttatagagacatgtatgtttcttctttgaaagtctccgttaggttccgctttggaagttatatcttctaggaaattaaagatacaatgttacaaagacgtgcattattgcaaaattcaattgtaaagagagctcttactaagggctctccttcatcttatcaattattaaaattcaattcaaatattccaaatactaaaattaatacaaatactcaaaatggaataattccatttggaaagacttcaatcttgaataatgctagatccttccattcattacgtccattgaatgtggaaatgcgtatgaatcaagatcaacaggaagaacctgcattgaaaaaattcgcaactgatttgactgaaatggctaaagagggtaaattagatccagttattggacgtgatgaggaaattaaacgtacaattcaaatcttatcaagacgtacaaagaataatcctgttcttattggtaatgcaggtactggtaaaactgcaattttagaaggtttagctcaaagaattattaagggtgaagtacctgaatcaatgaaggataaaaaagttattgcattagatttaggtagtttaatttctggtgctaaatatagaggtgaatttgaagaaagattaaaagctgttttaaaggaattaaatgatgaaactatattatttattgatgaattacatattttattaggtttaggtaaaagtgaaggttcaattgatgcatcaaatttattaaaacctgcattagctagaggtcaattacaatgttgtggtgcaacaactattgatgaatataaaaaatatattgaaaaagatgttgcattagcaagaagatttcaaccagttttagttaatgaaccaagtgtggaagatgcaatttcaattttaagaggtttaaaggaaaaatatgaagttcatcatggtgttagaattaatgattcagctcttgtaactgcagcaatttattctaatagatatataactgatagatttttacctgataaagcaattgatttagttgatgaagcatgttcagcattaagattacaacatgaatcaaaacctgatgcaattcaagaattagatagatctataatgacagttcaaattgaattagaaagtttaagaaaggaaactgatgaaatttcaattgatcgtagaaaaaaattagaggaatcacttgatttgaaaaagaaagaattagagagattaactgaaatttgggaaggtcaaaagaaagaattagatagagttaaaacattaaaatctgaaattgaaaaggctaaatcagatttagaaattaagagaagagaaaataattttggtgaagcatctaaattacaatatgatacaattccagcattagagaaatcattaaatgatttaattaaaaagcaggaggaacaaattaagaatgttgaaaatagtaatgaaggtaattccaatgttttattacatgaatcagttacatctgatgatattgcaagagttatctctaaagctactggtatacctgttcaaaatatgatgaaaggtgaaaaggataaattattatatattgaatcagtattaaagggtagagttattggacaagatgaagcaattgattcaatttctaatgcaattagattacaaagagcaggattaactgatgaaaagagaccaattgcatcatttatgtttttaggtccaacaggtacaggtaaaacagaattaactaaggcagttgcagaatttttatttgataatgaaaattcaattattagatttgatatgtctgaatttcaagagaaacattcaattatgagattaattggtgctccaccttcatatgttggttatgaggaaggtggtgaattaactgaaaaagttcgtagaaaaccttattcagttgttttatttgatgaatttgagaaagctcataaggatgtatctaaattattattacaagttttagatgaaggtaaattaactgattctcaaggtaataaagttgatttccgtaatacattaattattatgacatcaaatattggacaagatttaatgttacaagataatccaaataaggaagatgttatgaatattatgaaatcttattattcacctgaatttattaatagaattgatgaagttgttattttcaataaattaagtaaagaagcattacgtcaaatagttaatttaagaattgatgaattacaagacaagattagttgaacgtcgtattgaattaaaattggatgattcatgtaaggaatggttaacagagaatggttatgaaccaagatatggtgcaagaccattaaatagattaattaaacgtaaaattttaaatccaatgagtattttaatgttaaagggtgaaattaagaatggtgaaattgttgaaattacaacaaatgaagaaaagaatgatttagttattaaatcaattggtaagactaattaatttgtataggtttgtttacagttttttatttaatgaaagttatgagatataatctacatgaagaataatatgtgcctcagaataataaactgtcgtcactgctcctcaaagaagtatagcagaggagcatccgagcttgactcgtgtaaaacgtatcatcaacggtcacaaagtaataataataatattaataataataatagaatattttggttagaatcacacctttgacagtgattttctatatggtaaaaaaagagagtccattctaacccaagtgagctccattgggttaccatttaatccttaagattagatggcaatcgtcataactatcgtcaacgaaacgtaacgctatgcagaatatcccgatatgttagtaaaaattaacataacaaggtcataagaagttttacccacctgatgaagatgggataaacttctcgaagtcctgttaacgtcttctattcaataatccaactgaatgtaaaggatgtaagtatacaccaactattgaaataatgaaaactaattaactacaacgaattgtagccaggaaatgagtgtacaagactcatttaacgttaccgattgagatgatgtgccggagactttccccaagacaataaatgatgagaaaacaaaagtttctccttgtgtatgtctcgacagacgattcttgggctagaacaggctgtccaagagtaaacagaaggaaagagaggatggaaacattgaagacttataaagaagaagtagttaaaagaagttaaaattcttcacagagagaaagagagggtttctcattgcgaattttgaaggttacatgattttcactttgcaagggtttttctcaggttctgtatagtgggttctgcaggtttttagtgttggacaatggacttggatcaggttttacagtgtgtcactacggctgctttgcctcagagaggtgctgagcagacagcagcggagaatcagcttaaattatgggaatcagagaaaggtttctattataatttacaaacaatttatataacatcatcattacctttacaaactcgttggttagctgttatattgttgaaaaatggtgttgaaaaatattggagaccaactagaattaatgcaatcactaaagaagagaaaaatgcaatgagacgtcgtgttttcgatgttttacaggaacctaataatcaattagctgcacagaatgcacatttaatatctagaatggcacgttttgatttccctaatgaatggccaactttaattgaagatattatatcaattatggaacattcagaatcctcaccagattttatgattataatgaataatttaatgactattttaaatcaaattatcgacattacaacatttacagaaattactagtaattcatgaatctaatgataataatgggaatgaaaatttagagaaatatatcaaatgttatattaaaatgtattttaatctatcatcagagacaattacttcatttacattattgagtagttgtcaaaatataatgatgacaattctttcactattacaacaaaagaaattctcaatttataatattaatgaaactgaagatgattttgaatcaaagagtgaattttgggaaaaaataggtattatgtccattaaaataatgattaatgttacctctttcacttttgaagaaaataaacgtacacagatagtcaaacaaaagagtgattttaatgaaattcaaacttcaaaggataatcttaaaaatacttttttcacagttaatttaatagaaaatataacaactttattatttgatcattatttaaaattaagacccgttgatttatctgagtggacaactaattcaactgaatggtttgaggatgatgttttctataattgggaatttcatatcagaaaatgtgcagaagttttctttgaagaattttctaaatattttccaactttaattgcaccatttatattaaataaattaaatttaataaataacgttggtcttgattcaataacacaagattcaattttatgtatatttcaaataagttctgatttcttgaaaactcaatgtgattttaatcaattattaattgattgctttttaccattagcattttcaggtgattgggtattgaaaagaagagtttgtttaataattgaagattgggatagtgtgaaattaacaacttcggtacgttcagaaatttataaatatattgttaataaattattaactgattcatcaatgaatacagttgttaaattaactggtatgagaacattaaatcaattattagatgattggggattcgaaaaacaagagtttgttccatttttagagacaacattacaacaatatttacaattagttagagaacatgattattgtaaatatgtcttaaaacaattaccaacaatacttgaacgttgtcgtggtattataaataaaactattttaactgaaattattaaatatatggcaacattatgggatgaaacagatccagaatttgcatatcatcgtggtttaatgttaagagttattaaagaatcaattttagcacttgatggtgaaggacaagaattacattcaatgattgtaccaattataatgttatgttgtgatactaaatctgaattatatataacattaagtgaagatggattagatttatgggctgcattagttcgaattattaaaaataaagatgaactttcatatggtttagcaagtcctcaaatgatggaaattttagttcattcactaattaatttaacagaaattttaccatctgttttatcattaattcgtagttacattttaatatcaacagaaattattgatggatcaattggtgaaaaattactagaagtaattgcacaatatttaccaacaatgagagatgatgcaattgtacttacatcatcaattttagatttttcaattatgcaacaagataatttagttgtagagaatattgcacgtagtggattattaaatgttatggcaaaatatattggatgtgcatcagaatcgagatattgtgaaatgaaaatttcaattccattattaagaattatgattttaaggcctgatttacttttacaatcagtttcatcatttgaattatatttattattaaaacaattaagaattcaatgtagttcattatcacatgatcctgcaaatagaaaattacatgttttaggtatattatcattaatgagaccagaatttttaaatagtaataatagttcattacctggtgatgatattgaagtatcagttattttggaagaagttggagatcaaggtatttcatatgttttatcatcatttgctaatccgtttattacattagcattagaattaactgaggatataatagaggatcaaaatggtgatttacctgcatattctaaaatgtatgagggagaaattggattagaagaagatgagaattgtatggaatcattacgtattaaggctatatctaatggtgatggtaatattgtacgtagagctaacttaatacaacatgttctcattgcaggttcagcaattggaaatgcaggtatgttaactcctgtacaaattgaagaattacaatcattacaaaataaatcatcatcttaagtatgtatgtgacatgtatatatttttcttatcttatcttatcttatcttactttatacactttatcattcctttcgattaatttaatgtttccatttctataatgctttgcttgaatgataggatacctgttgaattagtagtacaagttttacaaaaacttgatgataatgatattatttctgtagctgaggcggggatagttgatttaagtaataccttaatttctgaatatattgcaagaaggatcaaacttactgcaattattaaaagtagaaaggatggtggataccgtttaatccccaagtatagttggatcatacccagtcatgtaacaaaactacgagtaattgaaggtaaagtaaaagaaaagcaatacttatcatcaattaatatatcttcaatggaatcattaaaatctattcatataacacataataatggttccaatttaattcaactattaattaatttaccaattaatattgaaattgttgaaattaagataactaaggctattaagggtaaagtaaaagaaggttttgaaattaggaatccatcaacacttaaaatgttaacaattgtaaatacatgtatttggaatcaaagacgtgtatgtaaatctgttggttggacaagtcatgatttacgtgtagctgtacaatcaggtgttcgtcatgaaagtaatttattaatgagtttaggtgcaagaggtgtatctaatagtatgattatcaatccattcactaatccaaatactaatccagttaatgttaatgttaataaaaatggtatcattcgtaataataattcagataatgaatccatgttaatagctttgggtaatgttattgggaaaatgattatactgaataaggaatctgtacaaaatattggtgttttcggagttgatgtactttgggtatttaaaatattacttaaggagaaagaacctataaaattaagtaatattagattagtacgtgttggtggtgattcaatggcaagaatgtcaatttggacatcatcaatacttaatggatcaagaagattatgggaaagaaatgttagaatgaaaccaatggcagttgtatttagtccaatgctacataatcatgatcatgaaaattgtaaaatagttggagcaaatggtaatgcagtgttggtaaatggaagtggttataaattattcaaagagtatacttattacagtggatgatttgtttctgtagttttggatatatgttgatttattatatataggttagattaaagtatatcatttaagtagatggttcaatatgatcataatcatcaatttctagttctgcatcaatcatatgattatttgaatcatattctaataattcagcatcatttttaacaatatctgaaacatctaatgcatgtaaaagttcgggtctcttagatttaagtaattcatgtttagcttcctcataatttgcccaacgtcttaaacgactgtttgattcaggccattcctgttctaattgaattggtgtcatttgataaaaatggaactcacataatggatattttaatggtttactattatcaatttttaaatctttcctatgatcaggtattgaaggtaatttcttaacaatttcacaaattgcacctgattcttcccaagtctctcttaatgcagccttagcaaaattatcaatttcatccttttcaataccacctttcggtataatccaacgatctttatgttttgatgatgatattaataaaactcttttcttttccttatctaatataacaccacctgcaactaatcttgcattatcctttgaactataaacttgattttcacgaccttctcttggagttgaagttctttcaacaactatatctaatttcaaagatgttttctctggatcgattgtattcgttgccattggtaagaggagattatgattaacttggtgttcaagttattaattagagaaatttcaattgaaaatcatgttactcctcggagttaaatggggtaatgttattcggagataaggctattataaagtatttaacagtatatatgtcgattaataaacaagtgtatattaatataaagattataaagatataaagactataatagtatagatactattcatctctaccagttctgtaaccagatgacattcccagacctggaactggcattgtaagaggtggatctgagataatatgtccaaatgaaggtggacaagtccaatcaactgggacaaaagtttcagttattgctctatcatagaaatacctacgttgatttggttcagtgatatcttgttgtgtgttagtagtaaaattttcggttgattcaccattatcaacttctttacgacatagaggacatgatgaattagttttcaaccattcaaatatacatggtctaccgaaaatatgttcacaaggtaattgaacgggtatatgagattctgatgggatttctgataaatttgaaacttcctctatttgatcaatctctgttgaataagtatttacataagttgcagtagaagttgatgggaacattattgatggatcatcagataagtaacctggaattaatgatgattgagtgttattatttgaaactatagttgaatctgatgattcagttgaattagaattggaactacccttttcctctatttctgcatatggatcataacaaattggacatttccccgtactttccacaattggtaatttatccagaatttcctgcgatacaccatgattaactggttcattctgtattgatccaacaacatttgctaatccactaactaaatttgaaatatttggattttcaatttgatttaaatttgtaaatgaaattggtgtattaccatcattattcattaaatcattaagtgaaaatgagagcattccaccggatatacctgaattcataaaaggatttgacatttgttagttattcaattgattgtcaaaagaagaatgtaagtcttatactactactgattgggatcaaataattcatttactaagtaacttaattttttccatgagaatttactatgaggaagtcgataagtcgactaagttaactgttcttactgtacttgatctatttgaccattctaatggttcaatgttattgaattattgattatatatatatcactacagattgaagttctattgcgtcgatgagaacttactatttattatacattaagatatttaaaaataactttccttctttttttttaaaggtattgacttctaatattaacagccattccatattcctctcttggtaatgcagctaattgttgatctgataatcttaaaacttgaacgactaattcggcttcatttggtggcaattgtaataatttaagtactgtattatatgataaatctggccattttgattttggtaatcccattaaaactaatgcttgagctgctgcaattgctaattttggattttcatttaaaattgtaactgcttcatttgatgaatttggtgatgatagaaccattttaagtttagctaataattcaattaaaatacctggtggaattgttgataatgttgtagatattaaatcttgttgtggtggaattggtaatattggtaaatatgttgatgcattagctggatttaattgattgttcgttggattaggtagtatgttcatgccgttactgttgttattattatttagtaaactattgttcatattattcatattcatcatattattattaagcatattattattcatcatattattatttagcatattattgtttatcatattattacccatcatattattcatattcatattgttcatattcatattgttcatattcatgttgttcatcatattattgttcatattattcatgttattcatgttcatcatattattgttcatattcatattattcatattattcaagttattcatattcatgttcatattgttattattcatattattcatattattattattattaggtattatttcttgatttgaagttgatttagcaacaattgaagcaacttgatgtaaatccataccatttgctaacatttgagaaaccattttttgtaaatcattattatttcgtattgaattaattaaagttgataattctaaatcatcagtttcatcatcaatatcaccaatcatttcaggtttatttaacatttccattggtactataacattagcaggtaataataaacgatttaattttaaaacaggtttacgtaactgatgattatttcttaaaccttcctttgataattcaattcttaattttttccttccttcaattttcaattttgttaaaatattcaaagcattaagggcatcaataggggatgaatattctacaaaacagaaacctttatttttagaatgtgaatccatcatacaacgaacatcaacaattggacctgatccacatacaactgatttaataactggaacatcccaatgataaggaatagcacctatgtataaaacacacgatgatgacataattattattcaaaaattttcgggtagtaactttgtttatatttttcctttgagggggtatagtacttgatattgttgaaataataaagaactactgttgatgaaatggaataaaaaaaaattttcatgttgaaaatttaaaaaagttttttttttcttttattagctaagttaagtgagggaaattgaaataattggagttgcgtctgtcttctgattgttgattacatgcatatcagagtgattgttattgttatataagacataactctttgtagaaatatgaatgtactagagattaagaaaagtgtgggagttttggaaaaggctagaactcaaaatgatgtaaccaccttacgagaaacattaacacaattaaaaaccggtgttaaagcaactgagaaacttttacgtgaaacaaaagttggagttgcagttaataaacttagaggtcatgaagattcacaagttgcaaatcttgttaaagaacttgttaaaaattggaaagatagtgtctctgctgagaaaagagcacgtaaaagtgaaagtactggtagtagtagtaatactactactactactacaaagaaggaagaagttattacatcacaagtgaaggatgaacaagcaatagctaagaatataacaagttctaattctacaaaaccattagcaccacgaacaatgactggagatggtgttaaaccaaatattcaagatccatcaagatcacgttcaattggtgcaatttatggagcagttgcattagagactacattaccaagtgaagaaattttaaaagtttgtgttgatattgaagaagcggtatttgaaaaatatcaattaactgataattatagaaatcaattaagggcattaattatgggtattaaaaataagaataatacacaattaagaaataatatacttaatcgatctataaaagctgaagaattagcaattatgaaaagtaaagatttagcaccaccaacattacaaaaagaatttaaacaattacatgaaaagaatttatttgatgcacagggagctgttgagaaaagagcagttactgatagatttgtttgtggtaaatgtaaacaaagagaagtttcatattatcaaatgcaaacaagatctgctgatgaacctttaactactttttgtacttgtgaaaaatgtggtaatagatggaagttttgttagaaagggtgataattactttgtgtacatattatttatatattattgttgttgattgtaatatagttattaataaatggttattgtagttacttacttacttatactaataatacatgaaaaatgaaaattgccctgtatacatttgtataatttcctaattgggcaattcccactctccgctttgagtcattcattttcttaaattggttaatttttaatcaaattatttcaaattgcctcttttctataaaaggaacctctttcccactttttttaaaatttacttttattcacttctttctttctcttctttctttctttcttttcttctctcttctttcttttatttaccaaaacaaaaatgtattgtaaagataacaataacttcataggtaattaaattcaagtattttcttttcttactaacattctctcttgattatcattatagaatcttttttgtttttcaattcagtctattttttctttttttttttgcttttttttctttcaagtttacaattttacatttcagctttttcaattaacaattaacaattaaaacttacagtactaaccttataaacaattaacaataacattaaaattaaccttatgaacagtaacaattaacaattaacattaacattaacattaacattaacattaacattaacattaacattaacattaacattaacattaacattaacattaacattaacattaacattaacatttaccttatgaacatttcttataaacattattaaaaactcttatcaaggacattaaccaaggacattctaattatttacaattaaaattacaattattttctactgactttaaaatcaatccaattgtaaattatagttgttaggtattggtattgttgctatctagttgctttgttgcttttctgtggttgctttttggttgttgttgcttttctgttgttgcttttctgttgttgttgcttttctgttgttgctattattctggattttaaattatgggttatggggtgggtttgctatattattattaattgctatattagcttattgaatattaaaaaaataaaaaaaaaaattaaaaaaataacaaaaaaacctaaaaaaaaaatataatctttactatttaatctgctatcaaagttagcttcactttattattattactattataaaaatcaaaaaaaaaataaaaaacttaaaaattattaaaaaaaatatcaacttgcttttaatctgctatcaaagttagctttattatattactattataaaaacaaaaaaaaataaaaaacttttaaaaaaaaatcaaaaaaaaaattatcaactggctatttaatctgctatcaaagttagctttattttaatcaattattataacaaaaaaataaaaaaaaaaactaaaaaaaaattcaattgcttttcaactttcaattgctatcaatgttagcttaattataaattaaaaaatataaaaaatataaaaaactttaaaaatttaaaaaaaaaatctttcctttatctcttgctatcaaagttagctattattattatatcttatcttataaaaaaacaaaaaaaataaaaacattaaaaaaattcaaaaaacaataaaaacaatataaaattaaaaaaacattaaaaaaaaagatcacaataaatttcaattccaattctaattccaatacaattaaaataaaaaaaactctatttaaattcaaattacaattataattacaattccagttctaattaattacaattctaatttaaaatttaaatcctattaatccaatcccagtgattaatcctatccaatattattaagtaaatattatgtaaatatcaaatattatgtattattaagtaagtaataaatttttttttcttttttttaaaaaaatagtaacagtaatgttgataatagataagtagatcggcgattacccaaataggaaataccggttatcatgatgaatgttgaaaatggttttcatgagtcaattttgaggatggtatgtatgttgtttattcttgaagtactttatttagagtagctgaaggacaaatggaactctctggatatgaggcatgtatgccatcacgtactaatcatgggatttacaataatttcataattggtgcacaatataatgttgaacttgatcttccaaaaattgccaaagctgtaaaagtattatgtttgaaatatccacatttttcactaacagttggtgaaaactatacatctgagtatttaaaagaatatgatattttaaattgtatcgagattattgatgatttaagtattgatgaaatcttagataaatatactgattttaaattcagttatattaataagacaccattatggaaagtattattagatagtaagagtaatacattatttttcgttgttgatcattcatattttgatggtacagctggtaaaaatttccatagtgagtttagtaaagcattggatattgcaattgatgatggaactattattaaaccttcatttaaaacgtatcctaaggcaactgatttaatgggatttcaagaaagagaatctagtggtggagtctctagtaaggctacatatcctcgaatggatgacaagttaatggaattaccaatgtatcgtcataatcatacaattaaacatttaaatttagaaaatacgaataaattaatcaatttatctagaagtaaaggatttaaattaactggattaatttattatattgcatctaaatcaattactaaaagttttgaaaatgaaattgaaaatgctaaattttgtgcaatgattccaatcaatagtagatttaaagttcctaaaaatgaagaaaatgatataattactaaatttggattattctttggtaaatattttactactgatgatttaaattatattaaagaaaatgattttattacaatttcaagtaatttccaaaaagctttaaatgataatattgataaatgtatggaacaatatgaagtatttgaaactaatattaacaaagatagatcacttattgataaatcattccaacaaatgagagatagaaataatacaccattaacaactgttgcaatatctaatctgggtatgttatcagataataaaattggtttagtttattttgatcaatcaatggttgatgcagtatttggattacatttaatttcatcaaatgaaggattatcattaaattttacatctcatagagctgttcctaaagatgtttatcaaaattatgttaataatggtattgaaattattaatgaattgttaaaattagaatagaatagaatagaatatagttatggatatatagacattacgtaatttgaaaatatttatgacattgttttatgttgtgttgtatttgtattgagaatgtagaatttattgtattattaaggattgtaatgtgttttgaaatagatataagtatatgagagggtagtttgtgggttgtatagtgtatgattgtttgttttatggcttgtattggtgatttgaaggatgattaggggatttaattaatttgacgagccacctaaaaagtgaaaattggctattctgaagaatatcagggataatttgaaaactttacatagttgatttgtaataaattttttcacttatagaatagtcgtatcttagctggttacgtgttataatacatgtgttatcatagaaataaagagtgtatgaatataagaaagaaccataagagagaacatgaagcaaacggcattaaaggatgctcggtaataacgattactcttttcggataattatttacaattgatatgactcttgttcttgatacttctgttcttcttatgatgtagagtagaacagagagtagtagatagaatagcgtattacttatcttttcattgccagattgaaagagtgtataatacagtggctatataataaagtgaaaagattttacgataaagaaaaatttaaggttttcgtcattatgataataacaatagttagccgtttttctaaaaacaaagcagcaatcatttaaatatcaatgatcatcttcattataaatctttaactcttataatttcttcttttaacaactttgaatgttattaattaatttacttacatttttatcatatattttatttacaactgcaacacctgcaaatccaaaactactccaagcattcttagattgtcttaaatttaataatgctacaaattatggaattgcagttgaaaataatggttatttatcattagcttcaattaatactgatttacctacaacttcaacacctttccgtatttgtgataaaatgtttggattaggattttacgctagtttcgatcatgattatcataaatttcatgatggtgaaaatttgaaaagtattgaaaaatttacaggtgatcaattagttgaattgggtgttgtttcaagagatattgatgtttctgaaatgaataatataatggaaaatattttatcctcattagatgcaggagttgttgatatggaaaaagttggtgaattatttggtaaaccatcaaattaatattatgtattttatataatatataatgttttataaaatagtattttaactcttacaatgattaaacatcactttttggaatgatatggttgaaaagacacctgaagctctccgatactttggtgatgatggtatgagaaaattgtacaaaagtcttaaagatgcacttaaggtctttgagaaatgcattctaggtaacattttagttgccaattataatggcattgaaagaactaaacaaattgatttgaatgatattgagttattaaaacaaattaaatcattggaaggattaaatatatatttgaaagattatttttgtgtttaccttgtgcattgtagatgtaaaattttcgagactaactgtttacctgttgcttctactggtattgcttcattgctgatggaaactggaacaacagctcataagatgtttgctattcaaataacaaatgaagtgaatggccaaccttcgcccaacgttgcatgttctccaaatttaactcaacgaaatataattaaagatgctgatatcatcatatatatgggatgaaataactatgactccaaaatctgtgattctcggggtagataagttgttaagggaggagaagaagagaaatgttccatttggcggttgtgttgttgtcttttcaggtgaatttagacagtgtttacctgtggttctaaataatccaagtatgtctgatgtttatgaaagatcgtttttgtgtttaccttatattcaagatgtaaagtttttgaaactaactgaaaatatgagaattatgtttgcagttcgaccagagtaatcgtgctgaaaagcaacgacaagctgatgcattactaaaaattggaaccggtgtagacctatttaatggtaaagggtatgttgacctgtctttgttaagtgctgatttgatttaattctttagcatgtctgttttgtcttaatttttaacacaagtgtatgatcaaaacatatttcaaaatgtcaatcatttagacgatcctgtgaaactagatgagctgatgaaaatgtatgcttcaagttgtgtattgaccccaaaaaaacgttactgttgatgaagttaatagaaaaatgcttgggtgacttcctacatctgttgaaatcttgaaatcagaacaattgaaggggttacaactcagtttattagtcaatggacacctcaggttaaaatctttaaagaagctagtatgcccgataatgaacttcgtttaaaagttggttgtccagttattttgttgagaaatgtaagtgcaggagatggattagttaacggaacaagaatgattgtcactgattgtcactcgtattcatgatcaaaatgttgctaactggataaccgacttttaaacgaagttcattataacctgatgctaattttccagttgaattctctccaattagagtttgtttctcaatgattaatctattatgtgtcattattgatggtttaaccaatttgaagtaccatccaggggtagtgatattaaccccccagaaagtacttgttccaagaagaacaacatgaagttaattggttaaaatttgaaaatagagaaaaacgagaaattacgaaataattttttttagctttatgtatatcgataaatgtaataataacctgtttatacattattaggtaaaccatcattttgatattacacatactttagataataatgttttataaaaaatttgtttaataataacttctattattagattcttatttcaaatattttataagttgggttgaaagacaatttcatgagaaaaattatgctgtcaagaaaatattttcagatcaagtatcttaatatctaagtgatgaagtattgaaatttttagaggaacaaggtattgaatctttaacaacgtctacatacaccccggtatcaaacggtgtcgctgagagggtgaatttaacgatcttgaatgatgtcagatcgatgttacttagttcatcgctaccatcctccttttggattgaagctgcaaattattccgttcatattagaaatcatatatattccgacaaattaagaagctcaccacctattgctgtgggttatgctccacttgatgtgagtaaggtgcatgaattcggtgaaaaatgttatattgctgatctaccatatggaagcaaaactgatataagaggatccactgcaatatacttaggtttattctttaatttaattgtgtttgtaccaactgtccatgggatgttttttaaatactcgtcatgccacttttacaaagaaacctgagttatattttacttcaatttatgataaacaaatgactaactttacacacacattgcatgataaccctttatcactcaatattgagactgatatcgactacaacaataatattgaaaactttatccattataaccctaaagagataaatgatgaaactgtgattgataagaatgaaaaccatcattacccacatgaggtggacatagatatggatgacgatgattcagcagatgaagattacgaatttcatttctcatagatctattagatctcgctgctgtaaatgaaaatcaactaaaagaggatgttgaattcctcataaatgacctattagactttgaaaataaaaatgaaaattcaaactcaagatactcatgatagaaggagacatcagagtgaaagagacgttgataatatgaagaatctggttgaagctgctaataatcataggtttgatgaagtggataatgttgagaataattatgatatgaatagttttgatggttttgatgttccatctcaaatagtaaatgaaaatattgaatgagttaatgatgttcctatgacaccagttgcaaataacaataatttcaattcaaatgattctattgaaacaaatcacaatgacagtgaagtagtaacaagagattatttatcagatgtagatttagcagatgttgatgttccagatagagtaaaacgtcgtaggattgttgaagatgttgtgtccgaggtaagctcaagtgaggaatctgataaaattagcaacttgagaaatttgattaatgaagctaatggtgtattaagtgttgaaagctcacctgttggaagaaacaatattagagaaattttgattggaaataataattctaatcaaatgaatttaatggatacattttcaaatgctgaagtcgaattaaagttcagaaatgctttgcctaagaaaattgattacttccatactgcgattagaattgatatcaataatgttcttgatgaagatattcctaacattagaaaccatctgatggtttaaccaaaatgaagtactatccaggggtggtaatattaaccccctagagagtacttgttctaagaaaagcaacataaagttaattggttaaaatttaaaatttaaatttccactttttcttatttttctcattttatttaaagcattcaaccaatcatattcatttattctactttactaatattatcttatttattaacatttaataccattaataacagtcgtaaatgagagattactatttccatataatattgaaatacggtgtagggacataaatacctgtaaatagttaaaggatagtgaagtatacatatccggagttaacataacccaatcaatacataatgattgggccgatctacattacatgcccagatactatatatgtcaaaatagatgacaatagatgacaagaggtaacaaaaaaacaattcaaacactcctttaagatgaagttataagagcaatggaaggttgaagatacaaataaactttattaacatagagatctgcatgataaaggggttataagtgtttcagattgtataattgtaattgtagttggtatattgaatatattgttttatcaattagatggttaacgtcatctcatctgcatatcaagatcgtacgttatctattatatacgggattataattatggcatttcttaattgagtttatattattaaagattaagatgtatctaatattacctcttatcaggagaattacttaaactcatggatggtactggtactggcaatattatattactctatcctataatataacaaccatgaggttatcagcttttgagacgttcatgaacacacttgcatgtcatagaatttacaataattttatagttggagctcaatttaaaccaatacttacaactaataaaatagcaaatgcagtttcaaaactttgtaaaaaatatccacaattttcattaactgttgctgatgatcatcattcggagtatttaaagaaatacaatgtaagagattgtattgaaataattgataattctaatccacaacaaatattagagaaatatactgctttacattttgattatcgaaatgggaaaccaaattggaaattagtattagattctaattcaaataccctattctttgttgctgatcatacatatttagatggtacagctgctaagagtgcatatagtgaaatttgtaaatcattagatgatcaagatattgatattgataatattgaaaataatataattgaaccaaaatttggtccttatcatacatcagctgaaatgatgaaatttgaagaaagatcaattgatgctaatcctaatgtaggtacttctccaccattagatcattcattattaaattcaccttattataaacatacttatcaagcaattcatttaaataaggaaaaatcagaaaaattgttgaaaatagctagagaaaatggatttaaatttactggtttaatttattcaattgcaagtaaagctattcttaatagttataaagatacaggtgaatttaataaagtacgttcagttattttaattaatagtagatttagaattcatccaaaggctaatgaaattttcagtaaatttggtttatttttcggattttattatcattatgatgatatttcatttgttaaaaattcaactatttcagaaattggtaaaaaatttcaaaatgatttaaacaataatagagataattgtcttgaattttgggaaaatttagaaactcattcattaaaagataaatcaattattgaacatgcaattaatagtattaaatcaaacgattcaaagccaactacaacattagaaatttcaaatattggacttttaaataatgataaaataagtaaagtttattttgatcaaccaatgtttgatcagtgcatttggattacatttattctcttcaaatgattatacttcattaaattttacttctcatagaggtctccctaaggaaattcatgaaaagtatgttaataatacaatgaatattataaatgatttattaaataaatattaagtaagttatatataccctatatacaatataagaacgttaaactattcgtatacttatacattacagtggtgtcacccaatggtaattaagtttagtataatcaattaaactttaccaacaggggtataatatatgcatacggggtgcatctctccgtcgtttgctatgtttcaaatatatagttatagtctaagcttttgattggtgaattctagaaactatagccaactacggcatttctcatcatcttataggcgatgatcatcgagtttaataggtccaagacaaattacggaaaaaccatatataagttcaatgaaagtaccaattgttataataatatcaaattaatgaatattttgaacgacaaatggtattatcagcatttgaaacttatatgagcttgcttgcaagtcatagaatttataataattttattgttggagcacaatttaaaccattaattaaaccaaataagatagcaaatgttgtttcaagactttgcaataaatatccacaattttcacttactgttggtagaggtcatcatcaagaatatctgccaccatatgatgttcaaaaattgtattgatgtaattgataattcaaatcctaataaaattttagaaaaatatactgctttaaagtttagttattctgataaagttccattatggaaattagtacttgattctaaatcaaatactcttttctttgttgctgatcatacatattttgatggtacagcagttaaaaaagtttatcatgaaatttgtaaatcattagatgaacctgaagatgataaatttagaaaatagtattattaaaccaaattttgaatcatatccaacatcagctgaaatgatgaaatttgaagataaaatagtagaaattgaacccaatattaaaggttcatcacctgaaatggataattgaattattaaaattaccatattataaacataattatgaagttgtacatttaagtaaggagaaaagtaaacatttgattaaacttagtagagataatggatttagaataactagtttaatttatgctattgcaaataaagcaattgttaatagttatgatcataatgaagaatttgaaaaattacgtacaattatagcagttaatacaagatttaaaattaagtccagaagttgatcaaatgttatatgaaatgggtcttttctttggtatttatactccattatgatgatatttcttatgttaaaaatgctgatattttcgaaatggctaaaaattttcaaaatggtttaaatgataataaacataaatgtaatgattattgggaacatttagagacaaaatctaaaattgatagatcaattattgataaagctatacatgaaattaaattaagagattcaaaacctttaaatactttatttatttctaatataaatgttataggtgatgataaagttggtaaagtttattttgatcaaccaatgtttgattcagcattttcattacatttagcttcatcaaatgatggtatgtcattaaattttacatgtcatagagcaatacctaggaaaatttatgatacttatgtttccaacgttttaggttatataaatgatctttaaacttttataattccattttttaaactttaaaatatattctacttatctttaaatttaggttttatcatgttatctacatttttgacatttaaaattgtatttaaatagaccgataatgccatttttaaaagttattggaaataatgttacttttttctttaaagttagtaagttattatgcttttcaatttgttggacaaagaaacattcatgaataaggtcagaagtagttactaaatcattgaatcaaaaataagataatttatcactttagaggatttatcggagttcccgtaatagcggtattaagaagaatcaatatctcaatactgttttcttatcatatagataataaacaatcaaataaaacgcctcttaatcgcagatcaacattatttacaaatgccaagtaattcaattattaataaactatagtggtctgagtttagagttttttacaattactaaacaataaacaatagaaactggaaagtataaattcaaactttatcaacaataaactatattttatagttagcaatcaaaatattcatattcatcgttaacgttttgttatatcattgctatggttggttgagtgggaaataagaccgtacaatattatataaatccagcaaatgtaccatgaatgaatgaatatgctctgaactatcttttttttgccaaagatggtattatcagcatatgagacgtttatgaacttgttagcaagtcatagaattttcaataatttcatcattggagcacaattcaaaccattactcaagccaaacaagatagcaaatgtggtttctaaactttgtacaaaatatccacaattttcattaactgttggtaaaggttatcattcggagtatttaaagaaatatgatgttaaagattgtattgaaatagttcataactctactcctaatcaaattttagagaaatattcagcattaaattttaattatgccaataaaactccattatggaaattaatacttgattcaaaatcaaatactttattttttgttgcagatcatacgtttttagatggtacggctgttaaaaacgtttacaatgaactctgtaaatcattcgatgaagtggaagatgataaaattgaaaacagcgttattgtacctgaatttaaaccatatccgacatcagctgaaatacttaaatttgaagaaagatttgcagaggaaggtattgttgttgataagggtacatttccggaaatggatgaagagttgttaaaattaccatattctaaacataattttaatattgttcatttaagtaaggaaaaatcaaattatttgagacaattatgtagagataatggatttaaattaactggattaatgttttctattgcaagtaaggctattgttgatagttatgttcataatgaagaatttgaaaaattacgtacaatgattgcagttaataatagatttaaaattagtccagaagttgatccaatgctttatcaattaggtcttttctttggtattcatactcattatgatgatatttcttatgttaaaaactcaagtatttttgaaatagctaaaaattttcaaaatggattaaatgataataaacatagatgtaatgaattttgggaaattttagaaacacaagcaaagaatgatagatcaataattgagaaaagtattaatgattataaaaataaagatggaacacctggtactacattaactatgtctaatattaatgtattaggtgataataaaattggtaaagtatatttcgatgaaccaatgtttgacagtgcatttggattacatatggtatcatcagttgatggaatggcattaaattttacatctcatagagcagtacctaaggaaattttcaataattatgtgaataacggccttaaatgtataaacagtatttgaaaagtaaaagtaaaagtatatttaatttaagttctttaaaaccgtttaatgtaagatttatccgcttatcagttgttatcgccagcttaatatttcctatttaggaaatttccgatatatctatcagatctatttaaacgactggaaagtacgtttatttgatattaaatattgtaaatattagttatttaccaaccgactatgttgttatcagcatatgagacgtctatgtgcgtaagttctaataagggattatataataatttcatcattggtgcagaatacaaggaattattatcattggggaaaataatcaatgcagttaaacaactttgtttaaaatatccacaattttcacttgctgttagtgatgattatcattctgaaattatcaatgagtatgatttaaagaactgtattgatattgttaatgattcaagtattgaggagattttacaaaaatacacggatttaaagttcaactatgctgataaagtaccattatggagagtagtgttagattctaagacaaatacattattttttgtagttgatcatacttactttgatggtactgccggtaagactttccatgttgaattttgtaaagtgttaggtgatgatgatattgttgaagatagtattattagaccaaaatttgaatcatatccgacatccactgaaatgatgggatttcaaggccgttttgttggaagtggtattattgataaaggtacttatcctaaaatggatgaaaggttaatgaattcaccttatttcaagcataattatcaagttgttcatttaagtaaggaaaaaaccgataatttagtaaaattagctagagataatggatttaaactgacaggtttaatgtattctattgccagtaaagcaatagttgatagttatgaggataaagagaataagaaaatacgtacgatgattgcaattaatagtagattcaaggttggttcacaaattgatccattattttataaatttggattattttatggaacttatttccatattaatgatatttcattcattaaaaattctgaaattattgaaattggtaaagatttccaaaaaggtttgaatgaaaataaggataaatgtatggaagattgtgaagttttggaaactaaggctaagaatgatagatcaataattgaacaaagtcaagatgatatggcatcaagagatttatgtccattaactactttaactatatccaatctaggtgtacttaatgatgataaagttagtaaagtatattttgatcaacctatgattgattcagcatttgcattacatttaatttcatcaaatgattgtattgcattaaattttacatcacatagagcaatacccaataaaatttataatacttatatttctaatgttttaaaatttataaattctatttaagtttatcataaatatatttaccattagtcatttcctccaatatatccattactttatcaactacttgatcatcaataatttcaaattcatttggtttaaatttacttaaaacataatcagcaacaacaccagattttgttctatcaccattataatatctaccaatacctaattttaaacctgtataatttttaccaatatttgaacttgcttgaatatcacgtaaaccattatgacctctatgagatgaattaattttccttattttaactaaacctaaatcaacatctaattcatcaaataatataactgtttggaaatcagtttcttcaactttgaatttatttgtaaattctttgaaaaatggtgtaactgatttacctgataaattcatataaccaggtactctataaaaccataaatttgtatcattaattatatgatttgaaatttcaaaacgtccaatacgtgttggcattgatctatacctattttgtaatttatccaatacataatgaccaatagaatgacgagtaccattatattcctttggattaccaagtgataaaataagtaaattagttggtttacgtattggttgctttggaggtttaacttttttaacttttttcactgcaggtgtagtaggtttggaagttggtggagttggaggtttaggtgggatagttgagaaaaaacgacgagtgaatgagttgaacatattgtataagtagttatagatgtaaattaatggattccacattggataaataagaaaagagaataacaataacaatatgtccaatataggaaataattaacgaaattaagttaaattttcatgttggtggattaatatatcatgttgataacagttgatctctttttctttttctttttaaagattatatttgacaattaacaaccaaaatgtttaatccattagcacaattaaaacttataagtgatgaattaggtaaggaatcaagtgatgataataaattaggtattattcaagcattaggtattaaatttttatttgcatttgttttagttttctgtattttcgtttatcttgataaaacatcatcattaaatggacgtagtccagaggagaataagaaattacataaaatgggttataaagaggaagaagtaaaggaagaagtaaaggaggaaaaagccgttggatcaagtacaggtgttagtaagggtaataaagttaagaaatctcgtaagttataaacagtatgtattatatagatgatattagttctaatagaatcagttaatttgacattttatcacacaatatccttgctattttactagtattgatattaaagaatctaaattttatgccataatcagtctaatgattgaacaaaacaaattagcatatcataatatgattcaaaagtcaacaagatgggttaaccctaatactaactcagatattttgatagacaatctcattatttatctaaagatttgttgataatcaaatttatattgaccccatcctgttgataatcgttgttgagtaaattgctagtttctagttacgtcatataaatacgataagatgagtaagataattaatgacaattaataatataaaattacaaaagtaaataagtaaatgttaaataaaaataaagtttttgtttggaagttgaatagaaagaaataaagtagtaaagtgaaaaaagtagataaaaatgtaattgagattaaaattaagcaacaacttcttcagtttcatcttgatcatgattagcccattcaccttcagcatcaacttcaccttcagttataccttcaggaacagtataaacatcatcaataccttgatgaattgataataaaggttcctttaaataagaattatctaaagtccaagaagttaaagaattttcacaatcaataataatttgctttgaagcttcataaccatcataagcaggtcttgtttcaccaggtgtaacaggagaatcatctaataattctaaaagtgctttaccataaccagcaataagagccattttttcacttaattctcttaaagaatcaaattgataattaaaggaagcctttaatttttctcttgtaatatttgataattgagcttctgcaactaaagattcagcttcagctctaactaattcttgttctaaaattgaaattttaggagattgaggatctttatatttaagatgagcaatttcatcagtaattttaattttacgatctcttgaaggttgaactgaaccttcaatatttctaattgatttaagagtaattctgtataaatcatatttatcaataaattgatcttctaattcaccaatttcatagagaaggacaccaattttatcagtaacatcagagacatcatcatcattatctgcaccccaaattgataattgttttgcaactaattttctttcaacagagacagcttctaatgatctttccaaagatttttcaattttaattaattgagataattttctagccatttcaggaccgaaagaaccagcagtttgaattctaaaagcatcagcaattgaagttgtaccgaaaaatttaccctttgttgaggaaacaggtggaggaggagttgcaatttgagcagcagttggagctcttgaagatctcatagaataagttctatgcattgtttatttgagattggtttgttaaaagaaagaaagagtataaagaacaattaaataaaagaaaaagaggtagataattagataaatatcatacaacgccactagggaaagacaattaaattattagacaatcaaagttcatccacttatcagcagaaaccagccttagggaatttccattattttcatttacttcccaaaaggggaatgggcggttgcccttttgggaattattatcatattacgtaattgtattacgtaatgtattgcttaggtaatgatcacgtgactgattatgtaatatatcacgtgatacgctgcttacataatttcgttctgctttctcttattactactaatacattgattaataactatctgataaccttcaacaactttaccataaacttcctctaatttacttctaatatcatcaatactcaatttcatctcaattaatgaatctgcatgatttctgtaaactcttgtaaatatcattttctttaattctttactattttcacctcctttacgtaattccatcatttccattatacgatcattttgtcttttagttaattttaaagattcactactattaccatccattaatctctgtaaatcaactctatcacgaatttcatccattgcctcattaggatcttcaattgtaatttcataacatttaaaatctttaatccattcatttgtaataattttataaatttcaattccatgtcctttaccttgaaatggtggtaatataactatttgtgaaatacgtcccctatatggatatccttctgtgttattatcaaactctttactattgataaatttccaatatttataatatgtaacaaatccaataaatacatctttctcactgttactctcatagatgaaatacccaccccatcttttatcctttgaatcaatatatgatccaccttcaataaataataatgtaaaaatttgactacgtttcaataatttatgtccaatactttcttcattgtataaatcttcaaatttataaactttatatttcttaccatctctctcatattcattaacaattttatcaattggtaattcaaatccactctccttttcctcattttcaatactttcaatccatttactttcactattaattatataatcacccttatttaaaaatttactcattatatcttcaatatttttaacatctttacttaatttttccttatatttaacaactaataatgttttcaaacttttacaatcaaatgctaaatcaatacttaatcctttatatccaaatatttgttcactttcaccaaatattggatatgtaaataatggttgaaattttaataatttatcaggtaatgctaatgataattttaatgtatccgttgatccacatgtccattctcctggttcaatatctaatccattcattattacgtagctagttttaattacttactttaaacaatactaatctttatatcactgaataatctttcctgtgaaagtgtaactttaccactactacctaattcaagcaaatacataaatttactaacaactaaaccgcgagtttcaccatcgacgaggtctttaaataaggtctcctcatgtccaatcctatgcaacatatcctctttaccttcattatctaatgatatatcaatcattgcataattaccaatatcttcaataccatcatcgacaatcatatccttttcaggcaattcgttattaatttcaaaatcaaaatgaaatgaactactgtgtcgagtagctctacgaccttgttcaatacttgaaactgatgatgatctactatgttgtctactatttggtaaacttggaattgaagagtttctaccaattctaccatattcaatatccatatcataaacgtcattcattggaatatcatgttcgtcattattaatatgattattatcatcgtcactaccagtattaaatatatcacgatatttattaatatcagtcatttcaccaacacgtaaatcaaataattgaatattaaatttataccgttttaacattttatcttgttcaattgaaatatatccatctcttatcttcatgatagtttcactacttaacataacatctttatcaattaataatttacgacgtttatttgatctcgtttgtgggggtttagtaggtttctctggctgagcctcttcattattgatttcaggttcatttccagcaacatcttcattcaaatctaactcaatatcattaatattcatatcattaataaatccaaaatccatatcaaatgcatcaatattatcattaaccatttgttcactaacaacactatcattaataatttcatcactctcattcttaaacataacatcaccatctttattaaattcaaatccaacatcatcccatttttcttgtgtaaataattccctatctacaaccatactctcatccatttccacttccaattcttcttcctttttctccatatgatcatcccattcttcaattaaaccttgtgaaatatcaaattttggatcatcctttaataaaacaacttgatcaaatttttccttaattactattttactctttaattcacctaatctttgaattaacattctacaactactaacttcattccaatcattaatacattgtttcttaaatgctaaaactgtaccatacattaaattacttgttcttcttaatggtattttatcactaattaaaataatattttcacatgttttactaatatttataccattaattaatttcttattctttttactactatccagtgtagcaagtaaccaaactgtacttaatgtaggatcttgatattctaattccatttataaaaagaaaaagttatacaagaagaaattagatgagccttcgattttaaatttttataacggcaattgtaccaccaatggctcccactataccaattaccaccattatccaccacactatcttctctctaattggtatctctggaaatgtatggagatagtagagacatggtaatgtaagacaaactgtaaaacaaatcagactacctaataatgacattactttaccaaaatttgttaacattgtagtagcaattaagaaaactaaacttaataaaattctattaatcaatttattattaattttactatctaatatagtcactattggacgactaattaatggtaatttggaaattggtaatattgacattaatataacaattaattgtgaaatccaaattggataatcttcattaattaaaatatttttagttatttcatcttcaacattattaccaaacattaaaaatccaaaaacaccagtaaggaaatccatcatgaatgaaaatgtgaatgaaatattcatacatttattaaatttgctaggttttaattgatctttaaaaatttcagggaatgttgcatgtccaccccatggtgccatgaataatccgaatgagaagaatacatttttcaatgaatttggaaataaattggtttccattggtgttaataatgaaccgggggaaacagttttagataatcctgcaattaaaattgcaaaacatgtacaagttgtacaaattatacctaataatgataaaaatgataataatcttaacgggaggaaattcaaaattactaataatgaacaaataaatacttttaattcaaattgtggaattgatggtattatagcattaattgaatctgcaaataataaaatcattgaaatacctgcaccaattaaatctaatgtgaatataattaaaatgataaatccaatattattaccataacagaaaatcccaacatcttgatatgtttgtaattctggatatttttccaaaattttacctaataaaacagctgtttgttttgtacttattgatgcaaataataatgttatgataccaattacccaacctgataaatgtaatgcaagtggaatcgataaaatacccagtcctataagaacattaactgaattgaaaattgtctgtgttggtgtagattttaatgaaattataacaggtcccccatttgattcatgaatactattacttctactaatattattatgacgaatattttgaaccatatctttaatactatcagatattgaaactgcatcactattaataggttctctagtagatccataattaggaatataatcttcaacttcatcaattattgtatcaatagtttgttcaccatcattttcttgaacggtatcgtgtattggtgaattaagcttagaatcgaatgatttggaaagataatcaactgatctttgaacagatgatgcaaaattgtttattgaacctgcacctcctgcatctaataatgaattccttcgtgacatcttgagtgatagtggtaaagcagttgaagataaagaccaagaccctaagttttcgtcagcagataacgaaatcgacgaattgaaatttttcttagcgctggaaaattatttttcaaatcgccaaatttgacatgctaagtggtatatcgatctatattactctgctcttggacaatgttgagaactgctgtgaggagtagtcggaatggtgtgattaaacctttctttgctagatacaattctactaatgtagattactctaaaactatcattttacctcaaacttcgttcaataatagatctgatgatactttaatcaatgataaattattacctcaaacaactaaaaaattatatggttggaatattaatagaaaatgtaccgatattaatgatcttttcatatttcatgatggtcccccctatgctaatggagatttacatattggtcatgcattgaataaagttttaaaagatataattaatagatttcaattaatacaaggtaaaaaagttcattatgtaccaggttgggattgtcatggtttaccaattgaattgaaaactcttgaaaaattatctaaggaaagaaaagaacaggagaagttaattaagaaagaaattaagaaatcaaaggatgaaagtttgaaactggaattaaagaagaaattagatttattaaaatcaactaaattatcatcaactgatattattaaattatcaaccgaacatgcaatgaatactcaaaaaagtcaatctgaacaatttcaacaaatggcaattatgggagattttgaaaatccttatcttacactgaaaaattcctacattgttgatcaattacgtatttttaagaaatttttcgataatggattagttcatagacaagagaaaccagtttattggggatgtgagaattcaactgcattagctgagggtgaattagaatataatcatcaacatgaatctaaggctgcatatgttaaattcccaattgttcaaataaatgagaaattaaggggaattattggtgataaaataattaatgaaggtattagtgcattgatttggacttctactccttggactttagctgctaatttagctatttcaattaatgaaaaattcaattatacaattatatttaatgaaaaatttggtaatttaattgttgcagttgatttattacctgaattagagaaaattatcgaatttgaaaaacttgaaattgaatttactggtgataaacttctcaattgtggttataaatcattagttttaaataatgataaaacttatccattcattcatggtgatcatgttacaagtactgcaggtactggtttagttcatacagctccaggtcatggtcatgatgattatttagtttgtttgaaaaataatataaaaccttattcacctgttgataaatttggtaaatatactaatgaaattgatgaaaatttaaaagattttattggattaaaagtattgactgatggtaatcttaaaatgatcaaattattggaagatgttaaaggacttgtatttttaaatgaaaaatatattcattcatatccatatgattggagatctaaaaagccaattattattcgtgcaacacctcaatggtttattgatgttagtaaaattaaggaaaaaactattaatgcattaactgagaatgttaatttccatccaaaacgtggattaaatagattaacatcatttattaaaaatagaaatgaatggtgtatttcaagacaacgtagttggggggttccaataccagttttatatcatcgtgaaactggtgaaccattattaaatgatgaaattattgaaaaaattatttcaattattgaaaaggataatattttagcttggtttgaacaaattgaaaatggtgaaatttcaattagtaaatggttacctgaaaaatatcaacatttatcaaatgattatattttaggtacagatacaatggatgtttggtttgatagtggtagttcatggaaaactattgaaagatatcttaacgaagaaggattattaaatgatgccaagaagagaggttattattcagatatttatttagaaggtagtgatcaacatagaggatggttccaaagtagtgttttaactaaagttggtacattagaagaaaatagtgaagttattatgccatataagaatattataacacatggatttacattagatgaaaagggagagaaaatgtcaaagagtattggtaatactattttaccatttcaaattcttaatggtgataaaaataataatatacctaaaattggaattgatggattaagattatgggttgcacaaagtgattatactaatgatattaatgttggaccaacaattttaaaacatgttggtgataatattaagaaattaagatttacatttaaatttttacttggtaatattagcggaagtagttttgagaatgatattgatgttagttcattaccattattagagagatatattttaagtagattgaattgttttgagaaagaatgttttgaagcttataatgaacatagttattataaagttgttaaaagtataaatcaatttgttaatgttgaattatcatcaatttattttgatattagaaaagatgcattgtatactgattccattgatagtgaaaagagacaattttcaattaaagttatggaagaaattactaagattttagtatctgttgtttcaccaattactccaattattgcacaagaagtttgggacaatatgccatcaaagcttactcttggagaacgaacaccattccatgctggttggaaagtaggtaatgataataatgagaaacttgttaaatatgatgaaacaattgaaactcaatttaaggaaatactgaaattaaaggaaattattaacttacaaatagccaatttaagatctcaaagaattattggtagttcattagagactgaagttcatataagttctaaaactattgaacaattacaatctaaaataggtaaaagtgatttagaagatattttcgttgttggtagagttattattgatgaaaacgctgatgatgaaataattgtcagtaaatctacataccataaatgtccacgttgttggaaacattcagttgaacctgacagtggtcatgaactctgtcatagatgtcaatcctgtgtataagaagtgtatataagacatgtaaatagagtaaagtaatgaatagacgcgtcgtgtacatgtgcaaagtctttcacttgaagtagaaggttgaatataggttagtatctactagacactgcttctagagacaggacaatgtcattccagaatcaatataacgagtatcaacaaaccatacgtgccttacaggaacacatggcaactatttcatcacaaatagctgaacatcgtgttgttagagatacattatcaaaagtaccacaagatagaaaagcatggagattagcagatactgcaatggtagagactaatgccaaagatgcaggtgaagtattagatgaaaaacttagaggattggaacaattacaggttaaacttgaagaagaatgtcaaggtgttcaaaaggaatttgatgattggaaagttaagaataatgttaaaattgtacgtgggtagtgttcatgatgatatatctaatttaatttaatttaatttaatttaattaatcattgtatataatagtataataatataatatataaaatctattttgaatcttcagaggtaaagaggaataaaattacaaatatcaaccatgaagcaataactgatccaagaccagctaaataaacgtatgaattactattttcccatgatctaccatgttcatcctctgctaaatgtctaacagtgacaatatcttcagctcttaaatatgttaaacctggtttcctataatcgattctaaatgtgaaaataccaaattgatcaggtaatctacaattaatatgatgactaccatttcctaaattttccatctttaatctttggaatggatctaacataataaattctaattgtaatgtttcatttgcaacaaatggaacccattcaccatttttaagttcaatcattgaaaatttaacatcagttaaatcaccttgtttataaaaatcatcttcatcaacaaaaataatttcattaccttcattgtcgacacgtttatgaataaattcattaactttaattacacttttctgttggaaagtccattgaattatttcattagtaatttcagggtattcgaaaagaatatttttactaccaatccatgtaatacgtccattattacgaccttgaaatgcaactgctaaataaccctctaatcctgtatgccatggaatatcctttttagatgatttatccttagaaaatgaacttcttgatgtttgtaaaagaggaattaagaattcagaatttgaaataagtgcaactgatggatcctttaatttaatttccatacctgtatcttcatttgatgatgaaataatgtattcatttaagaattgatttgaattgatattaacattataatcaccattattattatgataatcgatatatttataaccttttggagatggataaataccaatttcatttaagaacagagtattatctaaattagttccattaatactatcacttgtaatgattatattaccaccattttcagcaaatgaaagtaatgatttataatcgatattactacctaatgatttagccttgtttgataaaatgactagattcttgtataagagattaccattaatatcatttaattctaagtcattatcattggcttcaattgagataaaactttgaccatttgatgtaattatatcagtaattgtatcaatattgtaatcattgtcttcaatatcgctattatcgtgtataacaacggtatctgcaatataccccaatacagagggcactagcagtgataagaatgtcaatagagatgcaaacttcattgttacagtgtacaatccaggaagaatcagtagtaaaagcaggtaaacttacagtatattaatctcaaattgaaaaattacatgacacatggcaactttctaaatttcatgcttttactaagtatatggaacttttttttcatctgttttgtttctttgtacaaggggaatggtagtatagaggtatagtatagtactattacaatgatatcgtcaccttctaatgaggcagcagagattgcatcaacttatgcacaattaaataagggagaggaagcagcaagtaaaatggaaaaattattagatcaaattgaaagtaaaatggaacaaattgaacaaatgcaattacaaatggataataatcgtatcaaagataataataatgataatgataatggtatttttgaatttaggaaattaaatgatgatttacagaatttagaacgtgatatggttgatattcaagaaagtatgcaactggattcaactcttgtaagtaaagagtgttaatggatgctaatatatgcagtatatctgatagttggtgtcttattggagaatttgttgatttgaaatacataataaagtacataatatcatcattttagccgactattaatgaaatagggtttaaatacgacacattaacgttaattaacaacactaataccatcaaaaacgttctatacctttttaaaatctctaatatacttattatatactcatatttaacactaattgtaacataaatcaaacattcattgcttaatcctagaaccttacgtaacaacggaaattacccagccttaaagaaacgttgcgatgttgatcttcttaaagttatagttgcttcttttgccatcgattgacaatgggtgttgaagatttaggtgataaggttgtacttacttcaagtaattcaactgctacaattttaaaatacggtgcaactattatttcatgggaaattgaaggtgttgaacaattatggttatcagaaggtgcaaaattagatggttcaaaacctgttagaggtggtatagccattagttttcccagttttcggtaaatctaatgaaaaaggttttgaaaatttaccacaacatggatttgctagaaattcaacttgggaatttttaggtcaaacgactgaaaatcctccaactgttcaatttgcattatcacctgaacaagcaaatgaagaaatttattcaaaatgggataatggtgataatgattttacattatttttaacaattcaattaaataatgataatttaacaacttcaattgaagttactaatagtgattcaattaaatcttggaaatttaattggttattccatacttatttgaaaattaatgaaattgaagatactttagttaataatttaccaggtgaattatgttatgatcaaattattgctgaaacttataaagaaagtcatcctgcaattgattttcatcaagaattagatagaatttatcaaaatgtttcaactgataaaattattcaagttattgaattaggtaaggttgttcataatgttcaaagagaaaatttacctgatatagttgtttggaatccttggattgaaaaatcttcaaatatgggtgatttccaaccaaaggatggttatcataaaatggtttgtattgaacctggtcatgtaaatgattttattgaattaaaaccaggtcaatcttggtccgcaaagcaaatcatttataaaggtgatgtaattaaattacaatctatttaagttatgatagtaattgtataaaatttgtatcattaatgaattgtttgagattgacttatattattttctctttttattttatttttttattttaggttattattacttgcttccaccttggctactttattttgatacttattttctttcaaagttttaccacttttgtctagccactacttagagagaaaaaaacagataccagacttaaaaaaaggcagaaaatttagaattagatcttaacatgcattaaatctgtataaaattgtttctagaaagaatttcagttgtcataatatgcaagtttaattgatctagatgcatctattacccttttaggtaactttattgcatgaatttgttagaaatatacctcaaataacagaagacatgacacaaaaaatgaccatttacccaaataggcaatttgtttttcccaattaggaagcgaaaaccattttttcatattctaaacctattttcactaacaaattttacaattattcagaaaattcaattattacaagttttgttagcagctgggaaaactataaaaggagacatctttccatcttttatgaaatttatttttaacactttaccttcacttctttctttctcttcttttagcagttagacctctcgtttcactgaccgccttaatagcaattgcattttcgccttttgcttatattttcattttactgattttttgttcattactgaatttcccaattatttgctttttttgttagcttgctattaaattttgcttttgcttgaattttttattttaagaatgtcttccactacttttgtttcctctgatgatgaatcacttaattatttatttgaagattctttatttgaagatactactactacttcttttgaaaatgcaaattcatcaactgatgatgatgatttgacagttgatgaagtcgcttatattaatgaactttgtgaagagctcgaagaacctgtaaaagaagaaaaagacgaagaaatggaaaatattaacgtttctgaatctactaataatactactactgatttaacagcagctatcgttgatatcaacgcaggtttagatgagtctgaatatttgaactttgatcttgctgaaacttcatttgctccaagtgatgaaatttacactatggaaactggtttaaatgaacttgatttagatcaagcaattgctttccttgatgaaaatgaaaatgtccttgagccaacagatgatgtttctgaattattatttaacccacaacctgccgttgttgatgtttcaactcaaactgtattggaagaacctttatcattaccaactaatgaaaattcattaatcctctctgatgaagaacttcaaaatatttttgataattttgacattgaagctattttcaacaataccactaataacaatgttactgaaattgattatccatcaacatcgattagtatgtctcaattagaattggttccacaaaacgttccacaacatgttgtttctactgaaatgatcacagaaacttttgtctctgaaacagttattgatgttccacaaagaaatttaactcaagaaagctttgcaaataaaccacaaaaagttaccatcaaaagagttatgcctgtctatacaagtctttcatataatagagcagatagatactgggaagttattgtttctaattctagctttcaaaaatttagctaataatgaaagccaaattatgagtgcagttggtggctttgctattgatacatcaatcattaaaagaaatgttgttgcttccttactgccaaactatgtcgatattagtgattttgaaaaatttgcatggtaaagatggttggaactataaagttaataaaagacgtgcttttgatgattatatttctctgagatggtgtaatcaaaagcaaaacttttatcaaccacttgttatcagatataagaagaatggtacaaagaagccaattacacaaaatttatgcccttattgtccttatactaaaggtatggatttaaacactatctttcatagtgttgatgattcctcttacatgcatcatgtttgtaaagatcatggtgtttatactactggtaatgaaatgccaattccagttttcggtaaaactgcaaaaggtttagttgcagtttgtggaatctgtggtaatacatgtaatctctcagttgatgttcatgcagataatctgaacaattgtctgatttcttattttagacattgttttgataaacataagaataagagacaaaatagagatgccaatgaaattaagcgtgaagctcaagagattaaagctaatagacacaatttaattctggaaaatttaattgtcgctaaaatctaatatattaaactaacttataccctacattttatatttatttaccttttttattttgtatttcctgtttgtaatattaaaaaacaattaaaaaaatctatttcgtagtaataaacaaacattgattttttctaggctcatagaatttatgtgatatatacctaaaaacttgattagtatcaagtacattaccatcatcagcagtatataattaataataatattacctgacttgatactaactaagtttcccattattatctttactattattacactttaataattgtaaaacaaatgatatatacccaattcattaatactaaacttattctctttatcatccaatttcaaattcataaagtgattcagtttgtagttttttaatattactttgggcttaattttattttaatattagtattattttttcaatttttataaaaacactaagattttttaaaaaaacaaaaatcacgtgactacaaaatacggtaaacaagaataaccgtaaaatttatttttgcgtaaaagcctggctagctcaatcggtagagcgtttgactcttaagtattgatatttaattaatagcaatcaaaaggctgcgggttcgagccccgcgttgggctttacttttttgaatttttttttgtatttacagtgatagcaagttactaatatgctttctgtttttacacaattttattacttagtactgtttagtattatttagtgttatttagcagtttttttgaaaatcaattgatagacttttaatttgtcattaagtggatgttttcttgttcaaattataactgtccacagatgattcagatttctccgtagcgtcaggttgtttttcaagatcaaccttttcatcaatcttttcatcaccaatttctttttcttccctttctggttggattgatttagttgtatccttaatagcaaaaaccattaataaaacaacaaatgcatgaaatccaatcataacataaagaacagctctaaattttttttgaatataggttttttcttcaaacgtatatgctttctctaaattacctgtgatggaaggaactaatgcattaccaacacttaataaaacttgactactagtttggaaatataccattaacaacaccttgtaaatgaagtggagtacattgaacaaccaatggcatataaatattgaaaatacatattaatactataaccgaacatgaaatatggaatgaagttgtatttccaatatgaattaacggtatcaaatttagtacgagagaaccaaataatactagctaatgaaagtaccgatgaaattatgaacatatttttgtaaccaactttcttataataagaatcccgataaataaatgcaccaaatactaaaccaatagacaatgggaaagccttaacagctgcaacaattggaggttcatgatcaataagtgtaaaagtttgaacaccaatagcagtaagcatgatggttgttgcaaaatatgtaccacgaatagttaagaataaataaacatttggaattttggaaatttcaggtgggaatagtaaatcaacttgaagtctccagtttgttgatttatcctcattgtcatgtttaatttgatattttttaatatagaaatattcataagctaaggcagagaggaatgtaaaaaatcctacaattaatggcgcaattgcttttggagatttccaattatcaccaccttcagtcaatcctaaaatcattaacaaacaaccagcaataactaagaaagccgcaacaaaatcaatatttttcatttttaacttattatgactttcagtttttttaattggaataattaaaaagataagtgcaatatgacacactaaagaatatgcaaagacaaaataaaagaaacctttgtaaccaattttactctctgagaatgcaccacctaaaacaacccctaaacctattgtagcagtcaatgcaagaattgaacaaacaatcataccgttcaaatatttagctaaaggaccactaaagtagtttgctgccattgcaatagttgaaggaatcaatgatgatgcaccaataccttgaatagctctaaagacaataagtgcaacaattgaggtatctggaataagagcacatattagtgctgaaacccaaaagacacctaatcctattagaaaaagattatgagagccaataatatcagaaattttacctgaaatcataatgaatgaacctaatgttagtgcgtaacctgataacacccaagttgcagttgatgaatcagtgttgaacctcttttgaatatcagcagctaacgtcaatgaagatgatgaatttaagttatccaatgctgaagcagatagaattataccaaagacaacaaagacattccttttctcttccggaacgacagttcttgcccatgtaaatgctttaacaattggaccaaagatcattagtatttgtagttacttgatttgttttacaaaaagagaaagagaaaattagaagtaagtttccctctactacattccatactttagaggagtagcctttaatttatactaacctgatccaacaccatcaagagcacacataaagagagagcatttgtaatctatttcccaaaagggagcatatgcatatatcttccgaagataaatttgtaattcatttcccaaaagggagcaaattctgttaatattagatagatttgtaatctatttcccaattgggaaacaaagttttttcaattttcatgttgggagcccaaaatttgtcagggcctatatacgacactgctgacgtaaagcccatatctcaggctagggaattgccatgagcaaggtattggacgtcgagtgttgttgactacaaccgacacacatattttatactatactatttatagatccttatataacagaagtaatacacttatccctcacctaagctatagagcgagtcacaaatattatattccgaaacaatggtgtttatctccaatgttttcttatggcaggggggcacagtcagtagatttttgtattgcgaacaatagaatgctgataattgtgtgttattatcatccatagtttctaaacaattgttggaacgtattatttcctgtataaatccctttggtattgtacggctttgttttgtattacgtaaacgtatatattgccaagtcagatacttaggtaaatactataggaatttctaaccaaacagtaagactaatttggaaatatgtttactaatataagctttatgttaaaatataaaatacaaaaattagaaattagaaatcagaaattagaaatcagaaattggaaattagaaattagaagttaagaattatgatacagttgtatctttattagcaatgatagaactctcaattgatgattctgaattaatttgaacttcttcttgtttttccaaatcgttatcattatcattattattgttattattaattctaggattatcatcaactgtttcatcaactttttcttcggatacttcagatgtatttttagtggtatctttaataacaaaaaccagtaataatacaacaaaggcatgaaatccaataataacatagaacacagttctgaatttattttgaatagctattttttcttcaaatgtattagcaatagttaaattacctgtgattgagggaactaatgcatttccaacactcaataaaagttgactaccagtttggaaaataccattaacaaggccttgtaaatgaagtggtgtacttgaaatgatacaaggaaagtagatattaaagtaaatgttaataccatagccatagagaaacaatggaatacaatcatatttccaatatgaattaacaatactaaattttgtacgtgaaaaccaaataactgtagctaaagtaataacggatgataaaatgaacatttttttatatccaacttttctgtagtatgaatcacgatatagaaaggcaccaacacctaaaccaactgagataggaaaagttttgagagctgcaatgataggcggttcatgataaatcaatgcgtaggtttgaacaccaatagacatttgcataacaaatgttgcatagtaaataccacagataataaggaaagggtagaagtttggaattttcaatagttcaggtggaaacaataaatcaatttggagtttccagttggaagacttgttctcattttcatgtttcctttggtattttttaatgtataatgattcatataataaagctgacatgaatgtgaaaaacccaacaattaatggtgcaattgctttagaagacttccagttatcaccaccctcaattaaacctaaaatcatcaatagacaaccagcaataactaagaaagcagcaaaaaaatcaatattcttcattttcaatttattatgaccatctgttttcttaattggaataattaaaaagataagtgaaatatgacaaatcaaagaatatgcaaaaacaaaataaaagaaacctttatattcaaaatttgtttctgaaaaagcaccacccaagataccacctaatcataatgtagcagttaaacaaaaaattgtatagacaatcataccattcaaatgtttagctaaaggaccactaaagtaatttgctgccattgcaatagttgaaggaattaaagaggatgctccaataccttgaatagctctgaatacaattaaaggaacaatagagtcatatgggataactgcacagataagtgaagatactcaaaagatacccacaccaattaaataaaggttatgaggaccgataacatctgaaattttaccagaaatcataatgaatgaacctaaagtaattacataaccggataaaacccaacttgcagttgctgtatcaacattaaatttttcttgaatattagctgctaatgttaatgcagataatgaacttaaattatctaatgatgtaccacatagaataagtgtatatacaaaaaagacgtttcttttctcttcagggacaacagttcttgcccatgtaaatgctttaacaattggatcaaaaatcattgtatattgaattacggtatggtatctcaagaagtaaataaaattatactatagacttaaaagtataaaaaagtatacttactttcttttatactaagtgatttgaagacaaaaaaaccacatactttagatgattaataatcatatataagaaagacccttttgagaaatagatctgctcccattgttcggaaatcggaaatattttttcactccctcgtatttatagccttatttccgttcttcgcccattttcttaatctccatttttacttgtttaggcagttttcttatcttttactgtatcttgctaagtacaatactagttaaataggttattgtttatgtattaaattataaagataagttaaagaagtacgtatatatgtcattttttgttgaatataaatatcttagactttatgtgcatgagggagttcaagctcatcagcacttgaatcagtgacaacatcttcatcagccaaattacttcttggaccatgataatgtctatacttatatgtgaaaaagaaaataactgataaaatccagaaaccaccagtaataacaatagcataattcattgtagtcttatcaacaactttagatgatgggaaacaaactaaaatcatgataaatgccccccaagcacatgcagtccaaccaataatttttgaaaataaatcacctgtatagaatgaacctctaacaaatttatctttaccagaggtaagtctaagaaggataggagtacaccaagcaaaataattacctaaaacactcattgagaaaagagcactagatgcagttgagccagctaaacataaacatccaagtaataaagctgcagcacaagctaataaaattgctcttaatggaactttcattttttgattgacaattttgaaaaatcttgacattggtaaaccgtcatctcttgcaaaagcccaaatttgtcttgaagcagcagtaaccaaagaacatcccataagccattgacaagatgccattaatgacatgaatgcaattgcccattttttacctaatgaatcataaataacttgtgccattggaaaaccagtatcagtttctaaaacacttgtaacatcaggattcatacaagcagttgtacaaattaagatgaagaaacctattaatccacaaaatgcaatggaaccacaaataccaattggaacaccaaaggaagcatttttagcttcctctgacatatgaacacatgaatcaaaaccaccaattgtccaaacagctgccataaatgatagacagaattgccaaccttttggccaatctgagaaattatcaacttgaccaaaaatgaaagcaccattattaaattcacctctattaattttagttccaattggtagtgcaataaagtataaaattaaaagtcctgtatgacaaacagatgaaacagtctgtaataaggcaacattttttgaagataaacatgaagcaagtgtaccagatactacacaagctgcaaaaactccataagttttaccattagttatttcaaaattaccatcatgagataaataaacagcagctaaaatttcctctgcattaccataaaagattgaaacacaaccagaacaaagagctaaagaatttgaaataccaacaataaaagataatgtaactttccatgcatctggtgcataatagaaagtccaataatataaaccaccagaagttggaattgcacttgctaattctgacattgcaataccaacaattaaaataaaacaagaagcaattgcccaagaccaaattgcacctgaaggaccagcagcaagtgcagcacctaaaagagatgaaagtgaaggtaaaatacccataattgaataagcaataccgaagatttggaaagttgaaaatcttctctttaattcttgcttgtaaccaatttcagcaagtaaatcatcatcattagcagctgcttgtggatcaatttctctaacatttgaagcacctgaagtaattacatgaattcttgtttgagttgatgttataggtgaaaaacctgtagataactttgatgtcattgttataggagggtttctattgtgaatggagaacaggaaaataaattacagaactataaacgaaggatttatgttggttatatatagatttcactgataccggtagataagcatgtataaatcataatttactggttattgataagataatcattgtaaccttaaatttatgtaatttatgaaagcttagatgtaataatatatattaggctaatacagacataacttccagatgtcataaactttaatcaataagtagatggtaataaaattcaacaatagatagaataagttgatatataataggcttaacagctacacttgcctattttggttgttttatctttaaatattgaaataagagacgcctcagatacctaaataagcaataataacgataagtggtggtgattgcaagaaacgccgtgttttagataagagatttgaagatttaacgggtataagataagaaggggattacgtaattattttattttaattttttatttttcatttttttcacagtggcgaaattttaattgttagtactattcagtatactagtttttttttttattgtttgatttggtgtttatgttagggaaggctgatgtagatatatgtcattggtatgtacattgtcattatagagtatactttgtagtacttcattagttattattattgacttttcacattaaaaatcttctctttgtcaattagagtgaattttcactgaaaatttactttattcattcaattgtatattcttttttttaagactttacccattaattactaacatatttagaaatagaatatcaaatttacaggtattgaatatgtgtttcaataaagttacacatgattcaaattcttaaatttgtggcaaaatcgatttactacatgaaaattgaaaaattttacgtctcattacgtaatccaaaattctttttgggaaatcaacaattacctaattaggaaaaataatcaaatagggcataatttaatattataataataagcaaagaaagatgactttgaatgaaggaattgcccatttagttgaatggggaagagaggaatattctttttattggctttttgttagtatttagaagattccccttttctgattgttttactttcacttattctatcccctttctttcatttctttactgttttgtgtcctattttgtttcatttgatttatttcatttactgccacaaagtaacgttgcatataccccggtttattatttactggacccccatatattttaattagaaagtttcctagctattagaaagtttccaaaacctatatttgattgaatcttataaattaaattattagtaagtataccattaaagtttaaaaacttaatttaatttcctgataactgaaccattttactaactgttagaacatttaattattttatagtttactgaatttttcagaatgcatttatcatctgataaatttaaggttgataaccaaccatcattaattgatgttgcatcaaccgctttagttcttcaaggaactgctcaatttattgatgctcttaaatctgattttgccaatttcaaagaatctgatactttcagaaaagcagaaattaatcttaaaggacaagctttcttaatgtaccaatggtcattaactagatattgtgtcgaaaatccattaagaatgaaatatattagaaatgatgcttttgatattaccgttgataattttgttattgaaaaggaagaaattcaaaaatatattgcaaatccaaaattcttatggagattctctgttagaaattatcaatttttcgttacctttttcaagtctagtaagaaatcgacttttttctttagtaaatttgaaactgctgatattgatgatagtcctttggtcgactatattaaaccaatcaaaaattatgttaaggataaactcaagaaatcagtaaatcttacaattacttcaactagaaaaccttattattttgatataagtttaatcactgattttatgaaaaagcattttgaacctattaatgaattcaaaacttcagaatttttattttctgatgattattatttacatgaagttcaacctgatgcaacttatgaggattttgtttgtcacctcttatgtggtcaaacaaaaaattttatttctcctttattattatggcacaatgaaaataaaggtactccaacaagtcttagatcaactaattctaaatatgcaaagagagatactattatgaattttaaaactgctgctttgaaaaataagatcttttcaagtttaaaaaatgatgttgatttaagtgtttatgatgctgataccacattcagaacaattaaaactgttaatgcacgtattattcctcaatcacctgttttattcaaagcagaatcaaagactttcttagctgtcaacaagaatgtctcccctgtcaaaaaatcaactaaaacttttgaaactgtcaattcaaaagctatcaattcaaaacctgttaatccaaaatctgttaattccaaatctgttaattccaactctggtaatttaagtatctatgatacccctactaaaccattatggtctagtaatgttaatactgataatcattcaacaccaattaaatcatcattaaatttcaacgatgatgattcaatgttaacattatcacctacaaaaccattagtttttaaaaatggaactaatttatctacaccatcaccaactaaacctttagtgtttaaaaataattccaatttatcatccccatcaccaaccaaacctttacgcttaggtggtaattcatcaattcaatctacaccaactaaaccactcaattacccatcatcaccaacatcaattagaaattcaccaaaagttttaaaaaagggtaaggtaattaaaaaggatgaagttgttgttaagacgccagagcatttattacatgcttatgaatttattttccctaataagggacaaaatccaactttaagacttgaatgtattaaggaaattttagaacataaaagaaaaagttgtgctacaactcatagactttatcatactgattggcttcatgaatatcttatgagtattgatacagttgaaagtcaattttacaaatttgcattgaaaacttttggttctaagtgccatgttaattattttagatttgatgatatttatggtgtctcagttagaactggttggtcaattccatgtccaacaaaggtaaaagttcaaatggctcaaaactttgtttatagtctttatcatgatactgatgaatcaataatgagattacaaaaatcttatgagaataataaagctggttatcaattacattataatccaacaattaccattaataaatcattaaaagtcaataatcttagatatgatagatcatttgctgttaagattaataataagggatttaatttttcagcattttttgatccaaaacaattaaattataattataaatcaactaataatacaattgaatcttcattatcaagtgaatcaaactttaaattatttcatattaataaatttagagaatttcaaaaaaattgtattttaggtaaagattatactggatttaatgatattatcaattcattaacaacttcaattttagatggtgctgaatcttttgatgaattaaagaaagaagttaataatggtgttaggtgatactgttaatgatacactgttaatgatactgttaatgatactgttaatgatactgttaataatactgttaataatactgttaatgattctgttaataatacagttgataatacagttgataatacagttgataatactgaagttactaatactgatgtttgtaataatgagattactaatagtgaagttgctaataatgaaattactaatactgaagttactaataccgatgttggtaataatgaaatcaatgatactgaagttactaatattgatgttgataataatgaagttgctgaagttgttgaagttgttgaagttgttgaagttgctaaagttgctaatgaagttatatcatctgaatctgataatgattttaatgttcaatcaagtcctgaacctgatactaatgcatttgttgttcaatcaagtttatctgatcttgaacctgatattgaatcagctaatgttgttgttcaacctaagattgattatgaaattagtatctcaaatgaagatgatagagaagaagctgaagatgaagaaaaagaagacaaagaagaagaagaagctgaaaatgaaaataaagttattaatgatgaagttgaaattaaacaatctgatcaaatagttgttgcacatattcctaaacctgctggcgggttaaagaaagattcaacaattaagaagaatgtatcagttaatttctctaaatctaatgatctttatgaaatttcatatgaagctactgatgaagatgaagatgaagatgaatcggatgagatgaatcagaagaagatagttatgaagatgatactgaggaaattgaaattgaaataagagaaataactaagcaaaatactaaattaaatggggtttctgaatatagaaacaataataataacaagaacaataattttaatgattacaatgatgcatataaggacaatttaattcaaaccaatgattctattaaattatttgctccaagagaatcaattaataaaaaagacccaattaaaattgataataataataataagaatattaataataatagtaatgattttgaaaatatgaatattaattccaatgtaggttgccaaaattccaattctcctccaattacaactccaaataaatctcataataaaaatgtcaagaatttctttagtaagttttccaagaataaaaacattaaaaaacttactaagaataaatatattcaaaaatatgagaagaatattagtacaatttattcaactactaaagattacattgatgaagttaaatccacatatcaaactagctccaaatacgacatcaatgatactttagtagatgaaagaattttacgtgaaatggatgaatgttgtaaatttagagaataaattatatttttagaatataatagattagagtgagagattgatgagaccttaagaaaatggaagaagtatgaatatttttcaaaatacattattattattattaatattaatattaatattaattattagtttcaattggtttttttttattaattgatttttttggcatgaatgattaaatagaatttattgtatgtagacaatatatttcacataatatattgaaataggattccccaagtaatagtagtaataataaattagttaatttcaattaattcatttcacatttcaattcagtttatcaatatttttaaaatattttcaattgattagtacttcatttcattcaagagatggtaagagggtaaggtaagtagtagcaactgaggtagtatagttgatgtattttaattgattttaagttatagttataagaataaaaaaaaaatgaaaaaagaaaaaaaaatagaaaagtataaaaaatagaaaaaaaagagaaaccaaaaagtcattgcttaatagaaagatggatagtgaaaggaagatagtgaaaggtgatactgaaaaagacaatgtaatggtaagtgataaatgattaacaaataatggtgaatgattaacagattactgattaacggatagaagattaacaaatgaagattaacagagaaaatagatttaacaggtctaagaattaataaaataaaataaaataaaaacagaacaacaagacttttttgacggggggttgaagttgttctactgttcccattgagagtgcttagacccagtatttgacagatgctgggagctacggtgggaatctattgcttatatagtttgtgtaatttgtatttaaagattaaaaaagatgaaaatcaaagatagccatgtagattcttacgtaatgcgctggaaattgtcgaatttttggtgatggcaaagttttgatgtttattataggtgttttcttttgcttttggtgttggatttctgtaagtgtagagtagtataggatgtctggagaccagttggtgggaatggcaagtacagagaatataaggacacaagttacgttgttcccagtggatccattacctactagtaagcaagaaactaattttattgaaaataataaagtactgaagaatgaacatcaatttacgtatgtaaatatcaatggattgaataatcaaggtgtaaaacaattggagagaatcaagatgacatttgagagtgatttattggatgaaattaagtatattttaaaccttttaattgttttatcaaataataatccttctaaaattgatttaaagaatgaatattcatttctgattgattatcttttaaaatatttagaaagttcatcaattgaattagatattaagattgattgtcttttaattattagaaatttaattcaaaatgttgataattgtcaagttttaagtggtaataaaaaattaagagaaattatattaaattttttaaatatttatgataattctattgaatatttgaatttctttgaaaatgatcaatataaggagttaattaaatattcattagatacaattgaaaatatttcatcatatttaagtccaattagtgcagatgatttaatttttaataaattaattcatattttcaaagtaaacaatgataaaataattcaattactattttaagatctataagtagatatctctatggtacatcatccaataatacatttgagaataataataactctaataataataataataacaataataataccaatacggatgcatcagttttaattgatgatgaatttttaaataaaacattaggatttttacttttattaagtaataataattcaattgatgatgaaattattttaacatcattagattttttaattcaatatttatccattaaagaggaaaatttaaataaattaatcaatgatgatttaaatagaaaattaattttagagaaacttttaccattattaatgatttataaacaaaattacaaaactgaattcaatagtcaaaatttgaattatcttagattatataaaagaattgagaaaacacccaatttcaatactaaaatacctataataggggaggaaaatccattaatgaaggaattaaatttacttaatgaaccacagagagcaactgcatggttaagatgttgctttaaacctaataaattagccaatataacacaaattgaactttggagagcgtatgagagtcaatttagtaaaattaaattattaccagcagttgaatttattaaaaatgttcaatttgcattcccacaaagtaaggctaaagttattcaattaccaaataatgaaggtagaaaatttataattgaaggaattgaaccaagattagaaattttagatattgaaaagggtaaaaatgaagcattagttaattataattataatgataatacattaaccaataattcatctaaatattataaaccagaattaaaggagagtgaacaagtggagattgagaagtttaattatggattcaatgattatcttaaattaaatgatattaatataagtacatgtcaattaatcaaggaaattttaaattatccaataggtgttgaattattaaagaatcataaatctgaatttgtgcaaaacttcatctatgttcctgacttactcaactacatctacaatgatatcattgatgttttataagtgtttaagtattgtaaatatatattgtaaattgtataattataagaaacttattgtattgtattgtattatgtaatttgtgattttcctatttccatttttcagtgggtgactactatattaaactgtggtgtttatctaagttctttctttaggtagaatatattagagtaacagtagagtataggatgtcattctcattacctgcatctttggctaagattagagtttcacgtatacatcatacatgggccaatactttccaatgttcaccacaattttatttccaaccaaaaacaattgatgatatttatgaaattgtcaacaatgcacgtaaatttaataagaaattaatggttgttggatcaggtcattccccatctgatttaactataacttctaatccaattaatgaatggttagttaatttagataaatataataaattaattaatgttaaaccatcattggatggtaaatttactgatgttacagctcaatcaggtatgagagtttatgaattaaatgatattttgaaaaataaaggtttagcattacaaagtttaggttcaattagtgaacaatcattagcaggtataatttcaacaggtactcatggttcatcacaatatcatggattagtttcaaatcaaattgttaatttaaaattaattaatggtatgggagaattaattaattgtaatgaatttgaaaatgttgaaattttcaaagctgcatgtttatcattaggtaaaattggtattattgttgaagttacatttagagctgttcctaaatttcaaattaaatcagttcaagaagttattaatattgaaacattaattgaaaaatttgattcaatttggacatctgatgaatttattagagtttggtggttcccatatacaaagaaatgtattctttggagagcaagtaaaagtgatgaaccaattagtgaaccaagaaaatcttggtatggtacatttttcggtagattattttatgaatcattattatatatttgtgttaaatttttaccaaaattaacaccaattgtcgaaaaatttgttttcagtagacaatatggattaattgaaacatttaataaaaatggtgatattgcagttcaaaattctgttgatggtttaaatatggattgtttatttcatcaatatgttgatgaatgggcatgtccattagttagtggacctgaaattattagattattatcaaaatcaattgaagaaggtaaagagagtaataaatttttcgttcattcaccaattgaaattcgttgttcaaatactacattaccaaattatgaaaatggtgttaaacaagatttatcgaaaagagaattaattaataaaggtccaatttatggtaataccgttagaccatatttagatacaacacctaaattaaattatgttccattggataaaattacaaatagtcaattaactctttatattaatgcaactatttatagaccatttgattataatactgattataaagaatggtttcatatatttgaagaaattatggaagcagcagatggtaaacctcattgggctaagaattatgataattccatagttactaaggagaagatgatggaatggtatggtgatgatttaattaaatggagagaagttagatcaaagatggatccaaatggtgtctttttatcaggtaaggaatggttaattagaaatggtattgttgaagaagatgttttaagtggtaaagaagttaaggagagtaagtctagtgataactctgttgaataagttgtttggaattaatttacagttactgtatatagtattataagatatagatatagatatagatatagatatagatatagatatagatatagatatagaccatttagaccttaatactgtacaacgcgtatgacatgtttttacatgttttgtttcatgtagttcttttctctgtttttggtgtttacaccgtgtttatcagaggtattggagtaatagaggagtagaatgtcatctccatttgccattttggatcgtcagaagaaaaagaacggttcaaatgctattttctccctctcaaccgtcaaataatcaacaattgaaaagatcatcatctgcattatcagcatcatcttcagcatttgccaatgttgtcacatataaaccatcaagagagagtctcaaagatactgaaaagccaactgaaaatactagggaacgaactacagaaagaaaacctgtaagatcatcattaagttcagttttaaaggcccaatctaaattttctggtaaatcatcagttgtatcatctaaatcaatatcatccattactaaaaagccaggtttaaagagaaataatagctgcaagtgctgcaattacttcaaatcatttacagagatcattaccctgggcttcatcatcagtatcatcatcatttaatattcgttcaaatagtaatagaaaattaaacaattgtgttattgataataacgtgtcatttaggaaagaattatcaccaagtagctagtaataataataataataataatagcaatgggttaagtagtatagatacatcaattgatggagttgaattaagtgatgaacaaattaaagtattggatattatattgaataaacgtaaaaatattttctttacaggatctgcaggtactggtaaatcattccttttaaaattaatcataaagaaattacagacaaggtatggtattactaatattggtgtatctgctccaactgcattagctgcaagtaatattggaggtaaaacaattcatagacttttcggtattggattaggtaaagaaagtaaagaaatattattagagagagttaagaagaaaatggataattatatggtttggagaagaatgacagttttaattattgatgaaattagtatgcttgatagtgaaatgcttgaaaaattaaattttattgctaaaaagattaaaagaagtgaaaaggcatttggtggaattcaaattataatttgtggagattttttacaattaccaccagttaataaaaataattttaattcaattaatttaaattattgttttaaatcaaatgcatggaaagaaattgttgatgaaaatataattttaacaaaagttttcagacaacaaggtgataatgaagttaattgatattcttaattctttaagaattggtaaaattgattataaaattgaaaataaattattaaaattaagtagatcaattgaatttaatgatggtattgaaccaactgaattatttccaactagaaatgaagttgaaaaatcaaatcttttaaaattaaatttattaaatggacctgaaattgaatttattgccaaagatatttcaattgataattctaaaattgatgaaaaggataaaaaatcattagaaaatttattatgttctgaaattctaaaattaaaaattggtgctcaagttatgatgttaaagaatgatgttcataatgatttagttaatggacaattaggtataattgaaacttttttaacaaaacccgttttacaaagttttaatgctagatttggaactgattatataccttataaattagaaattttgaaaaaaattggattaatgattttaaagaggaaagagttaataaatgatgaaggatattgataatttagattacttggataatttaacagttgaaattataatggaaataatgaaaagttttgaatcaaaggatgaattattaccatttgttaaatttacactaccaaatgatcaaagagatattagaattttaattgaaagatctgattttataccaccagaatacattaatatgtataatgcaccattaactcgtagacaattaccaattaatttatcatgggcaatgtcaattcataaaagtcaaggtcaaacattacaaagagttaaagttgatttacgtaaaattttcgaaaaaggtcaactttatgttgcaattagtagatgtgtatcatctaaaggtttacaagttattaatttcgataggaggaaagtatttgttgatgaagaagttatttctttctataattcaatttctaaataaaaagttaaatagtatataagattaagataccgtatatagagaacaaataatttttcaaaatatgttcatgtaacgacacgttatttctttctttctaggtaaggtaatacgtgtatttgatgtggattatagagtatggtgtcaatagtaaggaatggtagcacaggtaatacgagggctattgttttaaaatcctgatagagcttactacattgggtagatcaccagaatgtgatatttcagttgatataatgaaagtatcacgaaaccaatgtattttccaaacattcaactattgatgacagtctaagtttcctgaataagggacatgctagatggattgatagtttaggtaatgaaatcaatggtagtcataaagaatatttgaaaattgatacaaatgtatcttataaacttcgatcaatcaattgggaattcaaattgattaaaattagtaaagttaatagttttaaaataagtggtgatattgagaagttaattaatggagttattgatgtggaaatggatacagaatacctaatggtatggttatgattaatggtgaaaatatgaagattaaggatgtacaaggatggataggtaaattacgagatagacaatgggatattattggtgattttaaagggtatgaaaaggagaatagtatcaatttagatacagatagtgatagtgatgtagatatgggggaaatagagagtatacttgaacctgaagtggaaaagaaacactgttaataagagtataatggttgatgttaagccatttactgatataattgataataatatcaatactcaactatatgaatcaaataatagatcaacaaaacgttcacagaagagtcaaatggagaaatttttagatgattgggatgaaatggatgatttagattcatataaaagtagtaatgaaaaaattaatgaaagatcaatgaaaagatcaatgaaaagagtattgaggaaaagattatagttaataaaccaataatacctttaaaacgtggcattattgaaaaagatacagtcgaagaagaagattcattcaagtgttaaaaataacgataatttaaccaatatgtttaaacaaactaaaattattaaaatggcaaatgaagagaaattcaatgaattcattagagaaaccattaagtaatgaattgataaagattaaaaaatttcaagttaatataggaaataataataccagtaataatccaaggatatattccaattatcaaatgttatatggatccaataatgattggaaagatagattaaattattctaaattcaataaagtaagtaatggggactgattataatccaattatggatagtactattcaaacaattaagatgaaaagtgctaattataaatcaaatgaagttcaagttaatttatatcaaaatgatgatatgattatacctgaacttgatgatgttttcaatgaaaatagaggaggtaataaaaaagaatttagaaaacgtaaaaagagacaacattattcattgaaagtgattatgaagacgatggtgataatattggaaatgcaaataccaagttaaataatatacaggaaatacaaactttacgtagtaggaggaatagatcaaccaaggaatggaatctttaccaaaacaagaaacttttttcaatgatgaaactaatagttatgataaccataatgatgatgatgatacaccagttttcaaatctcgtagaagataagataaaattatttctttctttgttgtttccatttaaagacaactttaccatctttaacaagtttcttcttacttccaggtttcattaattctctttgtaattgtaatttagttttcacaatagataattgattttctctctctaatctttgctttaataaatctaattctttttcttttcagctaatgaattctctaattggtcggttgtatcattatcaagatttatatcatcatcatcattatcttcaattaattgttgaatttttaaacgattttctcgtcttcctaacaattctttacttgtttggaaatattcttcaggttggaaattatcaaattgattcttctcttcaacgaaaactgtatgtttaccattacttttgaataaatttggattttccaatgattttaaaatttttttattatcctttgatgaaatcatattaatataatttaaatcttgtcccttcattaataaaacttcatcatttgataaattatcagtaaattgacgtttttgaatcaatattccattttcattagttgttttattcttcatggaatgataaaattcatcatcattatgttcttttgctttctcttttaaaattttcaattttgcttgatttttatggaaattggcacttcttaatttataatctttctttttctccaagagaccaaatctagctctactagatatctgacccctctctctgtgttgtttcttctgaacattatgtactaatttagccatattgaatgtctactgaaaagaataacagtaataaaactataagaaactgaaaaaatttgaaaaatttggaaaataatttttttctgtggtgtttcccaattaggaaactctgattatcatgatttcatgttaggaacaacatgtttattcattaataacgacgagtaaagacacaatggagagaccattgacattggaattggcagtgttgtgtagttatgtactacagaaaccgataatgatactatcagaggatatttctcgatcattacagagggttaatccatataattgaatcatggaatgtatcattggtggaatcatatattaaagtcaatgataagatatcatattggatagaaaatggtggagatacgaatagtgatatgtgtaaacatataaggagagataaatatcctttgatattgtttaaggatattaattctgctaaagatataactatttcaagacaaatgatgataacaattagggatgatataaatttaacaattaatggagaaataggattagatataatcaatttggatgatataagggataaaataagtaatataactttaactattgaagttagagcatatatttacgatataattgttgaattaaggtattcaagatttgttaaaggtggattacctacatacattttattcaatttaattgaatttattaaattttgggcatttataaatgacaggacatacataactccaagaatagtaaagacttgttgtcaaataatattacctgaatgtttaaatcttacacttgttgaggaagatccaactttaatgtatggtagtgaaataaaattaattaatcaattaaataaaattataaataatgaagatattgtggaaattgcattattgaaagttaaacctccaatttagtctatgctgggtatttaatatcccaatatttaatacaaccatcagtaccagcggaaacaattttattatcatttaaccaatcgattgcattaacaccttccttatgagaatttaaaaatttaattgtccttgaaggtttttcaacagaataaattataatattagtatctaatgaagcagatacaataaattgattatttggtgaccatttaattgaattaattttagatgaattaaatgcccatcttgaagtaattaatttaaactgttcatccttgttaagactaaataataaaattttaccttgaacatcaccacatgcaaaatattgattattatgagagattgaagtcgaagttggtttattatataatttatttgaattattaattaaattcatttttaaatcataaatattaattgtatattttttactatcagtaatgataataaaattatctgaaatatctaaacttgaagattcataatctaatgggaaagatttaataaattcaccatttaaatcatagaaattaatttcatcttcaaaaagaactactacatttgtagaattaattttaagatcaattggttgtttagataattttaataatgtctttgtagttgaatcttcattaattaaattcaatttatcatcccatgaagttgataataggttttgactatttggtaatccttcaattgatacaataagtcccttatgttgatcatgacctttaattaaagtacttgatgtatcattatgtttaataatcttaccatcatatgaaccagtgtataataatccattagaataatttaaagaagttatactaacttgatgtgcatcaataacttgaactggattttcattatcattattaaatacatacaatgtaccatttaatgaaattgtaataaatttattctcatcaattacacaacaaccaagtaattgattttcaattttattatctaatgaccaagttttaattacattaccatcatcaatattaattaatctaagtgaacaatcagcacttgaaataatgaaattttcattattaatccaatcaattgaataaataccaccatttgttaaattagataaagatttcaataattcaccattattaccattgaaaattgaaataattctatcaacaccaacagttataaataattcaccatttggtgaatatcttaccattttaataaaatttgaatgaactttagtacaagttgaaataaatttaaatggtggacctttaaacaaaacaacatttaaatcatcaccaactgtaattgcactataaggtctcttttgtctaatatcaactgaattaatttgatttgaatgtccaataatttctccaacactattacctgtatccattgtaaagcaatgaccaaaattttcactaccattaccaacagctataattcttttactatcagaatcccaacttaaatcattaattctatttgataatattttaaattcactcttaattctcatttcatcatttgaacaatcccaaattagtacattacccatttcatcacctgatgcaatataataaccactgggggatattctagcaactgtaactgggaatttatgaccattgaaaatccaattattattatcatcacctaatgaacgaatgataacacatttacctgatggataaattaatttatttcttaatttatcataagataaatgagtagtaaatgaacgtttagtagttggattagatactattgctttatcaagtacaattgacatacctatagaaaagaaagtgttatataaaaatagaaatgattatttatgattacatacgtggtttaaaaatatcttcattttcagcagtttcaatccatttatcaatgagatcttctttaagaccatgtttatcatacatttcaatcaatggaatatccatttgggatggatgtgattttaaatgactctgtagggtgaaataagatgtaaggtatatcaatctttcaattgccattaatggattattatgttttaatattttccatattgtagtatttgaaagtatacctatattagattcagatgagattaattcttcacgtaaattgtaaaataaatcattagatgattgattcattgaaattatggatgattctatatttggatttgaatctataggatcaataataaattcatcaaccattaaatccataatattatcaaatgaactttcttttgataataaatttggtaaattaactaatttttcatcatctttaaatatagtttcaataaatataaaacaaccaaaatcaacaattccatcaatttcattttgtttatcaatataaccttgaggtaataaaataccatatttaatatcatcattagattttttaactaatctaatcatcccataaacattatttttaatcattgaatgccataattcatcataaatagttctatcctttaatgatgaatttttattagggaatattactaatgaatcattctttaaataccatggaggaattgaatttttagggaaaaaattagttataatcattgatttaattgattgtatggaaagtaattcagctggtaaatcagatacttgaatattagaattaccatatctataaccttgtgttatgttatctataggtatttcttcattattatcattaatgtaataataataatatctatctgtgattttattgtgatttgaaatatgtaatgattttgtattaatataatctgataatcctgtacgtttaacaaatggataagctgatatgttgaatgttaacgatgggtaatttaaaattgataaatgaaatgaataaatttcaacaggtttctttaattttggtacataataatttgttttagttaatgaatttaatgcatcatttaaagtatagaggaaattagattcatttgtaatattggaattaagtaatgattcaaatgatgatatgttagaagtgtggattggagagtttgaagttgatgtatctatacatataagagatattgaatgaatgaattgaaattaatgaattaagtttagaattatagttttgccaatccaatgattgattaaatgatgatatgatgattatttcacattgttttaaatgagatgatgattgtaaaaggttgtaaaggtatggaagtaagtctgtatttgtatctgtatctgtatctgtatcatttgtagtatttaatgatgcaataaaagttgttaagattgaccaattaagtggaattggagttgttggtggtgatgggaagttaattaatgagaatttatttgatttattaaacagtatagggttaataaggtagttatatgtaaagagtgatacatttggtgaagtatcattaactatataataaataactttagacatgtaaaaagaaagaatgtacaagaagagagtagatagtatacaatacgattattttatttaacttttttagcctttaatcttatggtttcaccattaaagtaaatacctttacccttataaggttcaggaggtctcatatttcttaatcttgcagcaaataagtttaatttttgcttgttggcaccttttaaaactaaaagagtttgtgaaggagtttcacaagtgattccatttggaattggtaaaccttcaacattacatctaccaactttcattttaacccatttaacattatcgattgtttctaaattaactctataaccagtaccttgaaatcttaaagttgatgaatgaccatcagttacaccaataattgcattattaattaatgaacgataagtaccccataaagatttttgaattttatttttatcattattgattgaaattgatagggatgtaccttcattagaaatatttaagaaatcaggtatttgtaaattaatttcaccatttggaccgttaattgaaagtaatgaattaaggataattttctgtgaaccttttggtattacttttgggataagcatgttgacggaatttaatttaacatcaggtgtgaggaatacaggtgatgaacctatgtgagatagagatgatctacaggaagagaatagacgtttggataagggattgcattgcttaaagaagagtataggatatggatatatggatatggacatatattgaaaaatggaaaaattgaaattttcatgttgcaaaataaaattttaaaaatattttcatttactattactatttcttttattcttcattaaggacaacactatggtaaggaaattaaagtatcatgaaagtaaattacttaagaaagtagatttatttaattataaaagtgataataatcatagagagagtgagattataagtaaatatcaattaactaatagaaatgattatcattcatataataaaataattggtaaaattaagaaaatggttagaaaattatcactattaggagagtaatgatccatttagaattaaacatgaacaattattattagataaattatattcattgggattattaactaatacatcaaagataagtaatattgagaataaattaacagtttccagtatttgtagaagacgtattggagttataatggttaaatttaatatggcacaaaatattgtagatgcaaataaatttattagacagggacatgttagagttggtaataaggtgataacagatgttgcatatttaattaatagaaatttagaagattatcttacatgggttgatgaatccaagattaagagaaatgcattaattttcaagaataaatttgatgattataaattagttagtttaaaagggtatttaatttattattatttgtatttgaagattttttattaagattataaggtaatggtaagtttaattcaagtaattttaattctttcctagtgaaatagaggaatttgataaatctttataacattggatcaattaattgaagttattctctgtagtatcattatcatgactttcaccattatttaatttttcaattttattaattaattgagaatagttattaaggaaagagataagtgttaattctgtgttgtgtattgattcaatacgtttattaatgtatgtattgtccattgtgtagtaagatatactatactatactatactatactatactatactaataataataataagatactaatgataaaataatagtcccatcgacgcaataaataaaagacgcgactatcataaatacaaacccgcactccccacacgtgacccacacactaattacccgattgggacatatacacaaaataaaataattcacttacttaataaaataaatttttcacttactatctcactatttaatactttactatcaaatcttattactacactttatttcttttgaacttccttctattccacaatacaatgtctgataacgaagttttagttcttagaggtactttacaaggtcataatggttgggttaccgctctttcaacttgtcctgcaaatccagatttattattatcttcttcaagagataaatctttaattgtttggcaattaactagagatgaaaatcaatatggtgttgcaaagagagctttgaagggtcattctcatattgttcaagattgtcaattaactccagatggtagatatgccctttctggttcttgggataaaactttaagattatggaatattgaagatggtgaatgtgttactagatttgatggtcatgaaggtgatgttatgtcagtttcaatttcaagagttgttagacaatttgtttctgcttcaagagataagacaattaaagtttggaatgctttaggtgtttgtattcaaactttaaaatctcatgaagattgggtttcttctgttgaatgttctccaactaatgaatcaattgttttctctgctggttgggataaaaccgttaaagtgagtactttttgctttttttattattttttcttctcttctttattaagaatatcattccatatgatgttagaaataatatttgctacttcggacactcttatgagtgaatgagacatataattatcaccaagatctctgatggttatgatattcttaaaaaattatgttcttttattgaaccacatactaacatacaaatctcccccctctatcactattacagacttgggatatgtccgatgcttcattattatcaaactttattggtcataatggttacgtttcatgtatcactatctccccagatggatcattatgtgcttctgcaggtaaagatggttccatcgttttatgggatttaggttcaaatgaagttttatttactcttaatgcaggtgatgaaattaatgcattagcattctctccaaacagatactggttagcagctgcaacttcaaattcaattaaaattttccatttacaagaacaagttttagctgatgaattaaaacctgaagttgcagaaggtaagactccagaatgtgtttctttagcttggtcctctgatggtcaaaatttattctctggttatactgatcatttaattagagtttggcaagttatgacttcttctgcttaaagaagttgtcgttactaaacttttacaatctttttaacttcttttcttttcttttttactaagtaactcatataaattataaatttcttatagtaaactcctagtaaacccccaatactacataacatgccttataataatttcattaactaatgataatttatatgcaggtccaaatccatgacatttctccttacctcttaatttttccattattttacttatattaatttcaacatcttcatttaattgtttaaattcaactaaataatcccaaattgcacttatagttaataatttttcatcattaatttcatatgattgtccaattagtatattactattactactatcatgttgacttaaatcaacagatttattaataaattctttctttgttgggaatttaaacataatattgtcattaatattatcatttcgattatcattcattggactaatacttatactactactaccaccacttaataaaatttgattctccatacctaacttaacattcttctcccttaactgttttaattgaatctctaacttttcacgttccttctctgcattttgaagtttaatagtaagttctcttaatttaccctctttacgttctctaaatgctctctgtgctgctctattttgtgccttacgacgttcatatgtttcatcatctatattcttgtctgtagtataatattcagtattaaatactggatattcaccataattattgtcttccattatcataaagaagtagttaagagaagactacatgatatatttttttttcatgtttttttcctagggtctttcttttgatatacaatgattaatccaatagataggtttaataatgatttaaataatcttatatcctctatacaatcatatcatcctaatgaatcattagcggtggatttaattaatgataatgatcaaattaatgatataataagtgaattacatattacaaatgataatttcaaatcttataataaatcaatggaaattaataataatcaattatcaaattcattaaataaaatacttgatacattagttgattgtaaaagagagttggataaattacctaaaaattgtatagtggataacacagatgatgataatacaaaggaaattttatcatatgctttaaaactttcaaaatttagtaaaatacctaaaacttttgatggtatgttattaccaaataattttatttggccaggtgatgataatttacgtagaggtagtttggcaattacttcaattatacctgataaaattataaattatgaaaattttggtgggaattataaagaaatagtggaagagaaagtacctaaacaagttgtggaaaatatcgtcgttgatgatgaatctgatgatgaattattaccagagagaaataattcaattgataattcaattcaaaaggataaattatcagttatgtcaggacttgatttattagattctgatgatgaatagatttagtttagtttaacattttagacaaatcattttcaaaattatttaatgcaattttaagtctattaacttcttcatctgtaatcgtctttgtatctttaccttgtaaactatcatttttccattcatggaactctttatttaatttatgtaaactttcctctaaattatcaaattcaacaatattattattaatttcttcttgattatcataatctggtagttcacctgtactcttttctttcttgatcatttcaagtaaatcagttgcagaatcaaattgttctcttaaatgtgctaatttaacagcaactggaatttctgtaattatctctgtatccttttcttcaatgtttttaaggtgatattttttgaaaaatttaataactttaccactaaatggtccattgaaagcaaataatgtcaaaaaacatccaatatgaacccaaaaataacatgatttccataattcaattgatttaccaaattctaatatattaaaaggttgaactgcatatccaaatactaattgtgttaaaatccatgaattaatatcataaaatttcttaaatttagaaacttttttaccatctttactaatgaaaattggtctaatatttcttctaaaaattttaccaacactttgcataaatgctccaagtataaatgttaaataatatcctggtaatgtaccatgccaaaatgctgatgttgtaaatgttataattgttggtataataccaacttttaatttatttgtttctttatcccttgtacatgttcttaaataaataaaattttttaaccatttatttgtattcatattccaactttcaagacaatcatgaacattttgtcccatttcaaactttaaaggatcaatattttgaactctattccaatacattttatcattaacattatcatatccattatatcctaatccaacaacaatacatgaaccttcactaattaaccaaactgcataatatttaaatctttgaaccataccaagtatccaaataaatattaatttataaataaatgatttattatatttaaaatcatcagataatgaatattcaattgtaattttaggtgtaagataaacaaataatccaatccatataaaaccttgtaagacttttaaaagtgcaattctaccacttttaggtatcttacgtttacccttaccaggttttttattatttggtacatcattaaataaatcagttaaaataaatttttcataatctgcataatcaaatgatggaccagttaataatgatgcataaaagaaaacataacctaaatatgaaattaactttggatgttttaaaattgctctacttttctgataagtatttaaatttgattcaaatttctccttatcctttaaaaacaattgaccatctaaatatgaccaaccaaatgcacttaatttcataaccataaccatttgagcaccagtgaaatcaatttcccccggatttaattgagcagtggtaaattgtgcatgaatatgattgatacataatgaccccattaaaacaattaaattaacccatggcataaatcttgatttataatattttgttaaaaaataagtgaacaaggagttacctagtatagtgaagaatcctttaaagttttcaataataaagaatatataaattgaacttgcaattataatataagtgttcttaaggttgattttattatctggtaatcttttaaaaatagcactaattgggaatgaaaggaataaacaaaccaatgtcttaattgaagctgcatctaggcccgtgttggtacataggtactctactagtatcctaaatggattgtaatgatcaattgattccatattgtcaaaagaaagaagtgttgttaataaatcaaaaatggaaattaatttttttttttgacattttcatgtaagtgttttcatccaatcaaataaacgttttctaaggacaatgattatagtgtatagaccagtatttagaaggagtatctttaatttatctaagatatccaagcagttaagtaaagagacggatgaataccctaatgcacagagatatactatagttaagaaatttcagtaccctaaatcattaatttatcaattaatttcaagagttgatttatataatgaattcataccttattgtacatcatcatttattaatgagagagattcaattactaatgaaccatcaattgcaggtttaagagttggatttcaatcatttaatgaagaatttacatgtgaattacaatgtttgaaggataataaagtaattgcaaaatcaataacccattcattatttaaaatacttgaaactgaatggaatgttaaagatgaaggtgattattgtattgccaaacttgaattaaaatatgaatttaaaagttcattgtataatcaagttagttcaatatttgctaaaaatgtatcaaatttaatgattaatgcatttaataaaagagctttagaagtaagtaataataataaacttttacaaaaatatatatagacttatagacactactcaaataacttacatgttgcatcacttaatctttgagctgctaaatctaaaattgaaacatcatcaacaaatgaaattgcagttctaataaaattagatctttcagttgaaaattcacttttaacactcatattacgacctaaaactgcaagtacaccaatttgggcactattaatataaaatttatccattaattgattataattaataccattaaattcatttgatttttcaatattaataataattgatacaaacataccacaatttggatcaattggtgttaaataaccttctttaaaagcttttgttttcattaatgaattaataaaatgatttttacgttttaaatattcatttctaactttagtaatccattgaatccaaccttcaataccacctaatttaataattgtattattaacgaaaatttgtgaaaatccacttggtgctcttgtcaataattcaccagattttgtaaataaattaataagggccttattgataaccatataacctaatcttaaacctggtgcataaattttactaaaagtttcaattctaataactctaccagtagtatccattgttgtaaatgatggatttaatgaattaataaattcatcatttgtaagattataatttggtgtttcatcatatttagtgaaatttaaataagaatatggttcatcttcaagtataataaaattatgtaattctgcaagttgataaattcttttcttatgatctaatgattgtgctaaacctaaaggattatgaccatttggaattgtatataacattttaggttttgataaattaggatgaattgattcccaattatttaacatgttctctaattcatcaacataatcaattttatgatcattaattaggttatttaacttaattggaattggtataccaccaaattcaactaaattatttaaaactggagtaaatgtaaattcttcaataagtacggtatcaccaggattaatgaaaatatcaaaacatttcattataccatctaatccacccaatgtacatactatatcccaatcatttgacacaggtttaacaactcttttaacaaattctttaatttgatttcttaattcaatttgaccattttgatcagaatattggaatgaatttttaatatcaacttcatcatcccttgtggaaacatcgttaatttgaaatgacaaatcatcatgtccacctttgaaaggttcttctcttaattgaacatttgcaccagttactgggaaaaatccataatttggtaaaccaccaactaattgaattggatctttatgtgcattttcaacaactggtacatcttgccaaaaataaactggatttctgttcttgcatctatctgataccaatggtagtaatgggaagtcttctgtcattgtgaaagtacttgaaaggtacttaaaagaaataattctaagaagaaacaagtggttgtaagaagtgtaaattcgatgactaataccccagacggtctctttatataagggtagccgtgcggcatcacatctcttttactgggggttcttctatggttatagggggtatgactaatacttggtatactctactctaatactctactctactatacactacactactatacactacactactgtagtatattatatagatacaacccaattatcatacaatatccacacataaagacatagatagataagcccaaataggaaattgcgaaagtttccactgataagcaactgataagagatgtctctatttaaatatcacggtttattcttctttggtggtctctatggagagtaagtttagggtaatggacatgcagagtagtatggggaaggctaatgacactagtcaagctttcaagaggaggaagagcggtaaacatcaaatgtcagcctgtatatcatgtaaacgaagaagaagaaaatgtgatggtaaatatccgtcttgttcaaattgtatacgatttggtgaagaatgtacaatggtatatcctccaacggggaaggaaattaaaagagattatctggaacaactggaattaaagataaaggaattagaagggaagttagatggtagtagaagtgttagtagtagtattgttccaacagatcttcatgaagatcattctgatggtatatcaccattatctacaatttcatcatcaacgagaagttcattatcagtgaaatatccaccaacttcaaatcgtaaaacagaattagcagatcaagtgggttatataactttaggtgcatctggtgaaactttctatattggtgaaagttcagcttattcatttgctaaaattattggatcttcatttaactattgtccaatgagtggtaagaatagtaatatcaatacaaatactcataatgaccttccatttaaacctcctaatattaattatgcgaataatttattaatttcatataaaaatactgttcaatgtcaatatccattcttagattggaaatatattgaaaaatgttttaattcagtaatgttaaacaattctaaaaatgatttagaaaatttctttatttatatgatatttgcaatttcaactcaaattattgatgataattcaagacaatattcaaaatcttattataataaagcattagaatattcaaatataattttcaattcaattaatattacaactgttcaagctttcctattaatggcaattttctcacaaaaggcacctgatggtgtatcctgttggcaatcaattggtttagcaattagaactgctgtcgttttaggattacataggaaaccttatattaagaaaaatcaaatattaaatgaatttcaaatacttgaacaagatttaagatcaagaattttttggtcagcttatggaattgaaagaattaatggattaattttaggtcgtccatttagtatttcagatattgatattgataccccatttccattggaaattgaagaaaataaagttgcttgtcatgttgttaaattaaggactattcaatcaagtatttgtacttttatctataagccaattacattattagaaaatgaagataatcttgaatcaactagatttgaaattttattagaattaaattcttggttgaaaacttacccatgtattgaaaatgcaatttcaacttttgaaactaaaaattggttcattatttcatatcataattcaattttacttttacttagacctgttattttggaaatttcaaaattaaaggataaatcacctaaaaattatttagaatggtttaaagttttcactgaaagtgcttctgcaatttgtcttaattataaagatatttatacaaagaaaaaattaagttatacatggttagcaatgcaatgttgctttgttagtggtatatctttcctttattgtatttggttagattgttcacttaatatactaaaatggaaacgtaaaagtttggtatttgaaacaataaatgcttgtcaaacattactttatatatttgctgaaagatgggattctgctcaaagatttagagattcttttgaaactttatcaaattttgttacatcatatattgaaaatggtgataatattggtgaagataacaatgatactaataatattacaaatattaatactacaataaacaaaacggatgaattatcaattgaaaatcaatttttaaatactggattgtttgttgatggtagtattgaaattgatacttatttaacaggtaaatcacttcacgacaattttggtaaaaatgaaaataagcatattgataggaataatgatattcatttaagatcaaataaggagaaagatactcatttatgggagttcttggatagtgttggtgataaatatttacgtgatttatttgttgaaatggaagattcctttaattataaataaattttttataaataaataaacattatgtattatatgaaagttctttattacttctaactcttttacgataaccagcttcaaaattttcatctttaggaagagttttacattttaaacctgaataaaaccaattaaccattgtaataccatcatataccggtaaacctactttttcttgaattgccttagaatatggtggcatattagtacattctaaaacaattgctttaacattaggattttccttaaccaattcaactgccatttgtactaattcttcctcgagatcctttgcaatatatggatcaccaaatttaataattctttgtaatggattattaggtttacaaccaacaacaataattcttttcatcatttcatcggtaactccaactccattaaaatgattcttatttaaagtttttgaatcaaatgttaaaacaccaatcatattctttgaagatgtagttgcaagtacgtatggaatttgtaataaactactagttgcaattggtatattaattcttgatgcaagtttatcttgaatttgtgctaaaaatccacatgaagttacaataccaatacatcccttatcttctaatttattacatgcttcaacataacaattaatataatcatcatcaaattgttcatgatttaacaacattaactaatgttgcattagtcacttgttgttgaataacggggaaatcataacttatactcataattacatcccctggtggtctgtgaatatcatcagtgtaatctaatgtaagtgcacctaatggtggtagttcatctttactttcactataataagacattgtgtgcttgtctatagtgcattttgttatcctgatatacttacccattacagtgcttaaatagtccataccagacctatacagatcctccccagatcagtcacagagacggaaagataatactccgataagaggtggaaatagacactgataagataagataaggcgtatattcccaaaacggaaattttgcaaattttgttatctttccgccacggtattttcacttaaataccaacggttctgctgttttcaatctgtggaatttggaagtaccttctttcttttaagtacaaaagtatagagaaaatgactaaggcaaaggctagtgttttattaattggtacaggtggtgttggtacaattgttgcttgtggtttagcatacaagaatttatcaacagtttcagttgtggttcgtagtgactatgaaaaggtgaaaaatgatggttggacaattaattctgttgattatggtaatataactaattggaaacctgatcatatttatccaactgttgcagatgccgctaaagatcaagagtttgattttgttattatcacaaccaagaatattcctgatgttattaaacctgaagatgtggctgaacctgcaattactccaggtaagactacaattgtgttaattcaaaatggttttgatttaggacgtccatttattgctaaatatccaaacaacatttgtttatcaggtgtctcccatattggatctcataatcatggtggtgttattaatcaaactcaaggtgataagtgtttaattagttattttgataattctaattttgataaaacaatacaagaagcaaaggctaaagaattcatcgaactttattcaaatgataagaatgatgtaacttattttgctgatgttaaatggtatagatataggaaattagtttataatgcaactttaaataccgtttgtgcattaactagagttgatacaggtagattacatttagcgggtacacttgaagcagtttcaattccagcaatgagagaagttgttaaagttgctaaagccgatggtgttgaattacctgcagatgttattaatactgttgttcattcagatgatggtgattggtttaaaccttcaatgcttgttgatgttgaaaagggtaatccaattgaattagaagttatcttaggtaatttacttacagttgcaaatgaattaaaggttgaaactccaactttaactattctttatcatttattaaaggcaactcaatttaaacttaaggaaggtaaaggtttgatcaaagttcctgaagagagaccaattaatgatgttgtttataattaagtcatttattgtataatttgtatattctatattgattattgaatgtatttttttatctctaatatatgttaaaatttcctttaattatgcaatttattttatcaaatactttttctgttacaaaatcacctagtgaaaaatatatatttaagcttaaaattatttgaaatattataaatattctaaaaaaacgatgtaaaaaaataactataaagaatatctaaattcaggattctcaatatcagtaagatctgcaaatgcaatattatcaggtactttatacttttcacctaattcggcaaccatcttatcctttttaatatttctccatttgtaaagaccatataaatacattacaataattgtaccagcagcaaatgaaaccaacattgcagcctttgcaccagaatatccaggagcttgatttgcattaaaagtttgtggtccaataatattacctgtacaataaccaacaagataaaacatattaacaacaattttctttgtattacctgcaacatttgaagaaatagttgaacaaacaccagctgaaactgctgttgcaatataaaatgataaataaccagttaatcttgaacctttatgatgagtaaaatttaacaaacacattccaacaacaacaatacaatttacaataatcattgaaattaagtctttgattattaaaacaataataattaattaatgcaaccattggtggaataataatatcaataccaccacctggcatattcattaataatgcatctgctgttgaaaatccaaaatcaccattaagtaagattgaaccaaaattagtgaaaccaccatttggaattgcatatgacataccatagaagaagaacgcataagtacatggatcaagtattgcttctttaagttgactcatcttaaacttttgattaccaaaaccttgttgattttcctttgctctttcaagaacatataacttgtctttctcatttaaaaaccatgccttggttggaacatctggaatatgaactaaactaataattccaagaaaaattgtaatacaaccagtgataatataaacacatttccatgatgcaaattcatgatgaccacctctatgaacttgtaatccatatgcaatacctgcacctaaaattgtaccaaaaccttgcataccccaccagatacatgttctcataaattgttcactctttctccaccattgagatgttaataaaatatatgatgggttcataaaaccttcgaatataccaagtaaaacacgacatgttaagaaaccggcagaattagtacaagcagcatgacacataaggataatcccccaaataataacagcagtggataaagttttagataatgggaacctttgtaaaagacgattagcaggatattgaaatactaaataaccaaaatagaaagatgaaccaacccaactatattcctttgctgacatatttaattcttgtctcatacccataattgaagcataagaattagttgttttatccattaattgacatgacattaatgcaacaataataggtaagatatgccaatcaatctttcttaataatttcttttcatatgcaggatctaattcaaaattatttatatcatcaatatatttcattgccatatcggcatcatcatcatgaacatgaatgactttaccgtttaatgaaacaacagtagataatataggatgtaattcatcaattgattcaacattaacatcaatgttttgtttctcagtgtcaccgtcggaatctgatttagacatgtatattaaattgtaatttgtttgtttgtatgctgagtaataaacttaaacaaaagacctaatcagaatcagacaagaagtaattacaaggatatttataccagactttttaaggatgtaataattaaaagataagaacaatttcaatgtgaaaaataataagctttcttatcttatcagtagcaaccataatagacgtaatgaaaaaattaaaatggaggcggaaagattgacgttcgcccatgaaaactttcccttatcggtaaggtacaccgtctatactgggcggatctttaatgttatcattatgattattatgattatcattgagtataatattacacagtgtatactataagagtaactaaagttttggagtagatcctattgtccagtccttatctgatgccattattgtatctttcaaacatcttggatcatcaataccggaattaattacattaagcttatctctaactctgttccaggagaataaatcacggaataatttatcacctgtagaattaataatatctacagctacatcaccaatactccccaacatcataaatgcatgacctgaatctcctcccattacgaaaactgaattatctttgtaatatgggcaatatgaaattaaataatcattatcttcactatctgaataccaacataatcttgtcattgtaattttagtaagttcaggcatatgaattttaacaaaatttttaatttgtttcattgcaaataatggaatattagtctctgtattatctggactccatttggttttaactttagaatttataccattagttggattaatccattttaatcctctatatcctactttaatatatccatttgtacatggaaatccatataaaccaccaattgcaccatctctaactttatatgtccaagttgggaacttattcattgcatatttttcttcaatataaggatcatcaactttaaataaacaaacagatccaccagttgcttctaatttttcacccatttcaggaataatttcacttgaccatggaccaacacaaacaattaaattatcacaagtaatgtgatttaccatcacttgttttaataccaatacatttattatcattttcagttaacaatttagtaaattcaccttctttaccaaaatatgtctttaaattatcacctccctttgataaacatttttgtaaaacccatctacaagatttatctgccaaaatcatacctccagttgtatcctaataaaccctgtaaatgatgaccatttttcttcatttcaaatggatcaacagatatttcatgtaatcctttacttacagctttctctattgcatcaggatctgaaacacagatagaattctctggcatgttttgtaatgttaatctctcaaaatttggtaattctttcttatcagttaaatggatattaccagtattataataaattggttcaccaccttcccaattagtttccttaatctctttattccattcaagaaatttttgtaaacttaatgttgacatttgttgataatgaacttcttcaccatatgaagaacggaaaatcttattaatatcagaggatggactatcacatcctttcaaatattcatatcctttaatgggataatcacgtttatcgaataacttaatattagtgtatccattttcaattagagacagtgtagtggataatcccataacacctgcacctaaaactataatagcattatctttatccatctttggttgtctacttcagagatagtcataaagaagaactgttaacatactcaactgtatattaataaaagaaagtcttcatctacaatctatataacacccaggtggaaagattaaccataatatagtaaataataaatttccactgataagataagataagataagataagataagaaaatagactttcttatcagttgacacaatatgtccgctttccttatcttttgttgatcatttgcatattaacgtataacaggcggttatatccacctgacacattactttaatacagccatatatcctcttatgatctacattgtctgccactcagatgtatcactcaacctctcactgtgagtcatagtaagcattacgtaacatattgcatgatcattttcattgattgttaatagtatgtgttagaataagagctacttacggatattgaattgagttacaaccttgttctccctagacatctctactaagatctctacatctacatagttattaccctcgtcgagttatgtcccagtagccaaccaccaggcactcgacgaccaatcctacaatagtcgtaacgacctcttgttcacctgagcctccagctcatcggtaatgtaatcccgtcatgtctcgggtaccattcctaatcgagtaataccggttgctagtcccttcccactcgtgtcctggactatcgaccataagtattaccctattaggtatggcccgagattcaggtatggttaattctagcagtatgtgacttagcggtaaaacgttcacgcgccgaatttgcgtgaatagttcctggtactagcttatagtaaccgatcccacatacagaaatgaacaaaagagcaactacgtactctttccttgaatacctgatattgggtgagcaagaatttagcttaaatgtcgttatataaagaaataaagtacataaacaatctggatctggatctagggaaaatccagaaataaaaaaaatggaggaaaaatattgaagacaattttacaggaaaaatccttttcactaaaattgactaaataatgctatgaaaatatactcatagcgacattttcattgattgtcatccattcaactgtggaaaagttttcgtttgaagagtatattctcaacttcgtcttctttgattgcaagatcaaactatatgtcaaaggctaacgtattgttgattggtaccggtggtgttggtaccgttgttgcatgtggtttggtttataatggttcatccacagtttctgttgttgttcgtagagattatgaaaaagttaaaaatgatggttggacaattaattctgttgattatggtaatttaactaattggaaacctgatcatattcatccaactattgcagatgccgctaaagatcaagagtttgattttgttattatcacaaccaaaaatattcctgatgttgttaaatctgaagatgtagctgaacctgcaattactccaggtaagactactattgtgttaattcaaaatggttttgacttggcacgtcctttcattgctaaatatccaaacaacatttgtttatcaggtgtctctcatattggatctcataatcatggtggtgttattacacaaagtttacaagataaatgtatgattagttattttgaaaatccaaatatagaaaaatcagttcaagaagctaaagcaaaggaatttgttcaaatatattcaaatgataagaatagtgttacttatttcccagatgttaaatatagtagatatgaaaaattaatttataatgctacaatgaatacagtttgtgcattaactggtgttgatagtggtagagtaaattagcaggtgtacttgactctatttcaatacctgcaatgtatgaagttattaaagttgcaaaggctgatggtgttgatttatcaactgattttatcgatgttactgttaaatcttgtgattcaggattttataaaccttcaatgcttgttgatgttgaaaagggtaatccaattgaattagaagttatcttaggtaatttacttacagttgctaaggaattaaaggttgaaactccaactttaacagttttatataatttattaaaggcaactcaatttaaaatgaaagaaggtaaaggtttgattaaagtacctgaagatagaccgatcaatgatgctgattataattaaattagttttattaatttatctaattatctatttaattatgtattattgctataaagaatatctaaatttaggattttccatatcagttaaatctgtaaatgcaatattattcgggaacttgatatttatcgcccatttctgcaatatatttatccttttgagcatttctccattgatataagaaatataagtaaattaaaattaatgcaccaactgataatgaaactaacatggcaattttagcacctgcataacctggagcttgagtttcattaaaagtttgtggtccaacaatattaccaacacaataacccattaaataagatgtattaataacaatttttttagtagttcctgcaacatttgatgaaataattgatgcaagacctgcagatgctgcagctgttaaataaaatgataaataacctgcgagttttggacctctattatgtgtaaaattaagtaaacacataccagcaactacaataagattaacaataatcattgaaagaagtcttctatttttaagaaaataataattgaaaagtgcaataattggtgggaaaacaatatcaataccaccacctggcatattcattaataatgcattcagatgttgaaaatccaaaatctccttttaataaaatagaaccaaaattattaaaaccaccatttggaatacaatatgacataccgtaaaagaaaaatgcataagtacatggatcaagtattgcttccttgaattgattcatcttaaacttttgattaccaaaaccttgttgattttcctttgctctttcaagaacatataacttgtctttctcgtttaagaaccatgccttggttggaacatctggaatgtgaattaaactaataattcctagtaagattgtaatacaacctgtaatgatatagacacatttccatgatgcaaattcatgatgacccaccttctatgaacttgtaatccatatgcaatacctgcacctaaaattgtaccaaaaccttgcataccccaccagatacatgttctcataaattgttcactctttctccaccattgagatgttaataaaatatatgatgggttcatgaaaccttcgaaatataccaagtaaatacacgacatgttaagaaaccggcagaattagtacaagcagcatgacacataagaataatcccccaaatgataattgcagctccaagagttttagataaagggaatctttgtaataaacgattagcgggatattgaaatactaaataaccaagataaaatgaggacccaacccaactatattcctttggagtcatatttaattctttttgcatacccataattgaagcataagaattagttgttttatccattaattgacatgacatcaaagcacctaataatggtaaaatacaccaatcgattttccttaataattttttttcatatattggatctaattggaaattatcaatatcatcaatatacttcattgcaacatcaacatcatcatcatgaacagtaatttttttaccattaactgataaaactgttgataaaactggattaagttcagttaatgagatactttcagtatgaatatcaatatctgaatctgattttgtcatttggcacttgttaaagaatgtatcattatggtagttatttaggatactttgctgtggtatttataacaagtaattggaaatagattccacaatttagaggaaataaaattggggctcaacggtgactgataaaaaatttcagaattgcctatttgggaaatgtatggagttatcattgcattaattatgaatatcttgaacaaacgggagaaatatccgccaagttgtttaacgttgaaagtttatcgaaacctgtggttgttattaagttagtgcagtggtggctgattaaggttgaaaaaaataattcttttcttcagtgaataagttaaatattaaagggtttaaaactttaattagtttttttggtacccttatgttaactaggtaagtgtttaatgttataaattagtgtgttttaaatttttaaaatcatgttaaaactaaagctatacaattattttgatatttgaaaaatattttatgtataaatactctttatttattgaaaatgtttagtttttagtttttttttgtaatttaggtagtataacttctattataaacttataatatttattttaagtaatacatttagtgctaaatacacttacaactgtagtatttaaccaatagaattacattataacaacaatttcaatgtcatgttctatgttacgtaatctttccaataataaaattttttcaaaggcaataattaattattctattatgttaatactttatagaggtcttgattgtaagatagtatagtatataagatagtatacttctattgaatgatatattaatgatatggataatgaacataatctaattaaataaatcttcaggtccaaaactattaggtaataattcatcaattgttttaattattttctctgatgcatcattattaaacattataattggtaattgtaatgatttaccattatgaatatttgaacctgcaaattctctaataacttgtctacaaataccacatggtgatgaacatttaattgaatctgttataactgcaattattttaaattctttttcaccttcactaattgcctttgtaattgcagttctctcagcacatatacctgcaggatatgatgcattttcaacattacatccattgaaatatttaccatttttagttaaaattgtacaaccaacatgaaattttgaatatggacaatatgcaaattcctttgctttaagtactctaatctttaattcttcaatttcttcctctgttactaattctaatgatgtctttgtcatttgttatgttatgttgattcaactgactgaaagaaagaagtgttaattatattaattataatctgattatcattgttaaggttaattgttattatcattattgatattatcccaatgaggaagtttagccgatggttgtattgtatacctaatgtactgtatcagtgattgtatcatccatttttaaaggttagttggtaatacatttattgagaggatgttagtgagtgatatactatattccaatactgagttgataatgtatatgaaagaatatgataccaatatagtaacaaataataatgattaatgtgttatcaaaatgcgggattatgattccgaatgtgaaatttctcaattttcttatcagtgtctaaaattaaattgataacagattagtatatactgatacattccttttacttttgatttctatacaacaacctattaagacaatcaaagatgtttgttacatttgatctggataaacaaatgaaaaatgttgaaagtatttcaacaatgaaaacattatcaaaaccaactaaatcagatgaattcccatttttccaaaaaattgataaatcagagaatgaaagattaggtatacgttcaagatcacgtaatggatgtcaagaatgtaaaaggaagaagaaaagatgtgatgaactaaaacctaaatgttcaagatgttgtaaatctaatttatcatgtatttggtcaacaactaataagggtaaaggtaaaaaggataataaacaagatattgaaaataggttagtatattatggtaatgaagttaataatgatattaggaatcatattgagagagacgaatggaagaataattgggatattatattaattgataataataataaaattagtcctaatgataatgatgataattataataatgataatgataatgataatgaaacgtttttgattgaaacattgaaaaatattcaaagtccagataacaattcatttaaatatgaaccatttttttcagataatattgaaataaatatcaatacatatccatcagcaagattattacaaaatttagatgatattgaaataattcatttagattattatagaacatgtgtttcacagactgtttcaattttacctaatgagacaaatttctttttaagtttatatcttccattagcagagaataataaatcaatattatatgcattaattgggtggtcatcagttttccttaatccaacaaatgatccaaatttttatttgagatatttgaggaaatcagttcaaatattggaagataatcataatcaaaatcgaaactatgatgaaaataagatagttactatatcattatatacaatcatttgtgcagcattaatttgtgcgggagatgtaaactgaatggcaaacttattttaagaaattatttaatatattgaaaaatcaaagtaatggtaaattaagtgaattaatgaaatatattggcaataattgtaaagaatttaaatggttaatatctaattttttatatcatgatgttttatcaagttcaagtaattataaaggtacatttttcaagataagtgaatatagtgagatattaaatttaaagacagataatgaattaattgatgaagaaatagtttgtgatccattacagggatgtgttagaccattatatgtattaattggagagattactaataaatatgttgaattaagggaagaagaagatgggatgataatgattgaaggtaataataattgcaataactttaagaataggatacaattatataataaatatgagagatattataatgaattaaagactaaattaaagaataccaaaccacatagacaatcattaaaatatttaaagaatgataaagatttagagattcatttaacattatttgagacatataagattagtttattaattcaattaaatacattaattaagaaattaacacctgaatcaccagagattcaaatattattaattgaattaattgaattgaattaatataattaaaagttcaaatgttaaaacatcattatgtttcccattattaattgcaggtatttcatgtataaatgggaatgataaagaaataattgaaaatttagttatggaaatgtcaaataatttcccagttaaaacattccagagaataatggttataattaagaaatgttgggatattaatgataatggtaaaaagagagttttatggtttgaaatttcaagagatcttggttggaatataagttttgcatagcaaattgaaattgaaattgaaattgaaatagaaatagattacataatcacggggatattacgtaatccaattttgaaaagtccgaagattaaacaataagctttaagcgggggagggggggtattttattcatttattcggttaatggggtaatctccactcggtatatctatctgatacgttactattcattcatttattgtgttgtattgtattgtgttgggaaactccactcggtatatgaactaccccccattacagacagaaaatttaattaagtcatttagcatgtttatcatgaagacaagtatttaaatagagttggtattccccaccgttattgattagagtttgtgataaattttcaatattttaattttttattaaactttaaaaagtcaaagataaatataactattaatatgattgttaaaagtcaaacaaataaagaattagattcaatccttcaagaatatactaataatggtagattaccttgtgcattaggtgcagttattaataaagataatggtttattatatgttggtagttcaggtttaaaagatattgaaaataatgattccttaattgataatgatgcaacattagcatttttttcatgttcaaaatcaattacaacaactgctttattacaattaattgaaaaaggtttaattaaatcaattgatgatccagttgaaaattatgttaaagatattaaagatgtttatattattaatggatttgatgataacaataaaccgatactaacaaaaccaaagacaaaaccaactttaagacatttattaactcatacatctggttttgcttattcatttttcaattatcattataaaactttacaagatactacaggtattccaaatattcttaatagtacttgggatgattttaatactccattaacttttgaacctggtacaaaatggcattatggtgcaggtattgattgggttggtaaagttatttatgatgttacaaatatgtcattaggtgattattgtaaagaaaatatttttaataaattaaatgcaccatcattaacatttgaacgttcaaaagatcaaataaataatacaattgaattacatcaacgtaatattgaaaatccaattgaattaaaacctttaagagatgttttacctgaaaaggctgaatttcatgcaggtggtcatggatgctttggtacaattacagattttatgaaatttttagaaattttcttacatgaaggtaaatgtcctgaaacaggtaattcaaattttaaaacctgaaactattgctaactactcatttaaaaatttattacctgaaaatgttttcattaaatcaacattagattattcagatgcaaatttatcaaataaaattgatttagagaaaatacctgataatttacaaggttggacttcaagtttccataaaattgattgttcattaccaacaggtcgtggtaaatcttatagttgggcaggtttaccaaatttatattattggattgatattgataatggtattataggtatgtgggcaacacaagttttcccatttatggataatgattcacttgaatgttttaataaatttgaaactgctgtttatcaaaatttcttgtagttattattattattattattatattctaatgtatttttatttttatatggctttattttattcaattcaattctattattcataaaaatcaattctgataatcaactctgataatcaattatgataattaataaatataaattatttgtaattacctatgattatttgtaattaatcataaacactccactatatcattattttaatacacattttaatcaataattgagtaaaataccgtgatattaagtggtaataaccatattattattattacataatcatccaatctcttgcttagctaatacaaataaaaaataattgaatgtatgcggaactcaccttcctgaaagggtaatagcaccgcacttttattttcacgtgacattttgcaatacagcgccctgaaagacttattttcacccaattgggcaatttgagccacactgggggtattagcaccctatggaaaaaccgttgaaactagtgtaagccgtataagaaaagcttattttagtgtttggaaaaagaaatttttaacacatccttcggtgttgaattactattaggagaaatttttcatcgtgatatggatagtaattacactatgattatgatattaataattgatattaatattaatgatataacttctcaactgtggtaaatcaagggatggattgaatatgatcttatttaaatggaattgaatttcctcttttcttgatttttctctctctagcattacattattattattaacttcttaacttatcttctttaaacaaaaatcaattcatttactgaaaaatgtctgataataattcatctgaaaaagtgaatgaaataaatactgataatattgaaaaatcttcctctattgaagataataataatatcaataatattaaatctccattaacattaaatccaaaacatatttcatctcgtgatgctgatattacacttgcatttatggaaaaatatgatgcttcaactcctgaaataactcctgctgaagagaaaaaaattagctagaaaaattgttacaattattttatcattaacttcaataactaatttattactttattctgataaagcaactttatcttatgcttcaattttagatcttttccgtgatactggtttaactcaaaataaatataataattcttcaactttattttatgttgggtatatagttggtcaaattaatttaatacttgttcaaaaattaccaattggtagattaatgactgcaatttcattttcttggactgtaattgttttcttacattgtactgctcataattatcaaggtatttatgctttaagattcttccttggatttcgttgaagcagttgcagttccaatcttaaatacaactatgggtcaattcttaactgctaaggaaaaggctgcaactgctcctcttttctattcaacatgtcttggtgttactattcctgttggttttattgcttatggtgttctttatgcaactaatacaattccaccttggaaaatcttctttattattattggtggttgtacattcatttggactattgttatatttttcttttatccaaataatccaactgatgcagtatttttaaatgaaaaggaaaaagtttggattattagaagagttcaaaaaacaactggtgcttcaattgaacaaaagacaattaaaaaatatcaagtttgggaagctttaaaagatccaatttcttggttattcttccttttcttcttacttcaacaattagcaaataatttaccttatcaacaaaatcttttatttgaaggtattggtagaattaataatttagattcaactttagtatctgttgcatctggtggttttgctgcaatttgttgttttattgcaactactttcttattcttttatccaaatttcactgcattctctgttgttttctggactgcaccatgttttgctgcttcaattgcagttgttacaattaattgggatgaaaaaattgctttattagcaatgttatgtttagcttctccattatttggtattccatggattctaatgttttcttggaattcaacttcttgttcaggttatactaaaaaattaactagaaatgcaatgattatggttagttatagtgttgcaaatattatttcacctcaattatggcaagaaaaggatggtccaagatatatacctgcttggattgttcaaattgttttatcattctttattgctccattacttgcattagttatttggtttattttaaataaaagaaataaagttagaaagcaaattgttgcaaatgaaggtgatgcaaaaggttttgttagtgatactgatggtgaaattgaagttgatattgccaaccttgatttaactgatttagaaaatgatagattcatttatccattataatttcctttaacttttactttttctttttaattcatgctttactatactttcttagatactttaatataataataataataatcacttttaaccaataataactaagtaaaaatttcatgtcaaagattacgtaatgaaaataaaaatttttttgctgcttttttttatttaaatggacgttgagtagaataaaatttgttttgataatttaatcatcacttgttcttcttgaaagaccagtgtagtgctattatcttgagaaaaagtgtgcctgtgaaagttcttcttgccaatcaggtattaaatcttcatttccaataatattttgatccattgattttgctagacttcctgtaactcttataccatatttttgaaaaattgatctaagcttgattataagatttcggggttttattgcaaagagtgagtacttaagattcataaattcaaactcctctattgtattcatactaatgattctcttttgtttcttagatagcttcaactttcttactcgataacacaacgcacatttatttgatgctttgttcaatagttttaagatgatattattgattaaaaagataattaattataaacaaagaaaaaggaaaagaattataaaataataaagagcatcaagtatcccatcaactagttggaacacttggttttcttctaaacatcattccataatgaggtctgacatcaagcaccattttatcatgctctggtaagacacgtattggtgtgatatcaactgtattatccagctacatccattttgtagtctttgaaacatttttgatttcaggatgcagacatttttccaatgagttcagtcagacatggaatccaaggagtgataatttccatgtctgcatatttgattgcaagtaaactttcatcctcataattgaacctaagaattctcattaccttaataaacgtccactcttttcccttcttaatttttgcatagcattggcagccatcaaattttaatattagtgaacgaataaacacataatcgagttcaaaaacagaaataccaaactttttttggacctgtgataaggatgtatatatatatatatatatatatatatatatatataaaaattaagattcctatatataactattattataatcaaatatgttattttatgtaaaacgaaaacaatttgaaaaattcattaatttttcggttaaaatttcatttcttgttttaagtatcggataattaaagtcttctaatattatttattgatcattaatgaaatacatgctctttctatagttatgactgtaaatcaaacagatataaatgatgaacctagatatgctgttttagactatatagctgtggatttaacaaataaagtatgtatgaatccatatgatcctaaacttcctaaaaatttaacaaatcttaatattgctaaatcattttgtgataaattagctagtgatagagtattagttcataaatgtcctttattggttaaatatcggtatcaaaactgtccaagattatgtcaatatgggagataaatatttgaaagtgaattcaacaaatttcgaatcaagattatcagatttgttctcctttaaaaatcaaaaaggtgatacaatatacattattgaggaaagtaattatatgaaaaatgtttggagtgtattaccaagtcattatgtacctgaacttttaacattagttaaatctttatatgcacagttatgccataaaattaatattcaatatttcaatatatcaatggaagaaagactaaaactttttccaaattcattattaaataatatggaaatcaatttacttaaagctattgcaaataatgatggtgagtactatcttcaatcgacatcattagataactaatatgatcattgttatttcattattgaaagctatgaataaacaatctcctgaattttattaatataattttaattccttacactacatcaaaggataatttcaagtcaatgttaatatcacatggattcactgttggtgatatagatggaaataatgagcaaatctgttcaattaaaaaaaaatcagatgtttatataggctcttatcaatctgatacgaatcttaatattttactaaaagactcgatgcctggtttattgtttttaaaagattgtcatgaaattatacaaagggatgattttaattcaaaaattataaaatcttccaaggaatttaacttcaatagattttctagaatattgatgatgtctcatataatgaatacagatacagcgcaaagattacataaagttttaagattaaacaatgaagttaaaataaggtcaatatttaatgaacttccatataaaaatagaatacaagttaagaatatgaattatgatgataacaatacagaagatgaaataacaaatatactaatcaaacttttgtctcattcaagagggaaaagtgttgttattagtgataataaagataaaatgcatgaactgtatcataactttaagtctttagttaattcagactgttctcttttgttatttaaagattctattcatgaaacttctatcatggataaatttcaaaatgatcttaccaaacgtgtattgattacaacagaatatgatgtaaatgatttccaaataaatgacatacaaattgttatcttatatgaatataatccagagattgaaatttttatacaaattttgaacttcattaagtttaaaggaatgatactgatatttgataaaaatcctatatgtcgtacatcagaagttgaaaagttctacaatatcacccctaaaggccatcaaaattgctgtaattattttattgatgacgaattcattaaaaaactcaaccatgtgattattgaaccattttcatttggatatgttgaagatgaaatagaaactagtaaaagaggatttgtagatgttgatagttgtgataatctgtctggaaaacaatatgataatacatctgatgaatcagtagatagaaataaacgttgtaagattgaagatgttgaagaaagtatgatgtctgcatcaaattataataaggaattagatggaaatgataatttgaaaactttggtttatgatgctgctggtatatcaagtattgttagctcacccgttaaaacgaataatatattgaagttttcaaatggtaactcaaacataaacaagatttatttatcagaaagctttacaaatgatgaagttgaaagtaatttcagatgcttgttaccaaaacaatttgattactttcataccacaattggaattgatatcaataatattttagatgaagatattggtaatatgagaagttgtttggttgatcttgaaaatttgtatgagaagttcccaatattgagaaatattaatagcgtaaattataaactatatgaatatttgttgattgaacatgtcttcaaagatccaatgtttatttgttgttttgcagaacttgtgcatttaacagatattgttccaaatgaatacactattctttttttatgtgcagattttattatgtcaatttttgaaaaaagagatcttgggggtatgaagggaagattgacgcaagtgaattcgaaaacatcagaaaatgcgtgtggttatttgaaggaatttaaaatgctttcaattaacttgattaaatattataaattaaagattgataatccgaaaagtgatggaaaatggagaagattttataaacgtcattataaaaagttaaaatcttatggatgggcaaataattacaaaaagaattatttatttatcaagactttcgttcgagatccaatccctagaacgccattataccttccaaatggaacttgtaaagattgttttggttcatgtgagagttgtgtgtacaaaaagatacccaatgctgcaaaattgactgttttcaaattgtatatggatggtgtggagttgaagggagttctaaaagagttagaacaattaaagaacagaaaactgttcagtatttatatgattctatgtttgacaccaagtgatgcttatgattctttgtgtcatggtattgtatagtatggtgtattttattaactttgtaccttgatttttactaaaagtttacatcacaaaacaccaaaactgttatcagataattatgggaatgttttgttcagaaaattttgggatttaaaaaatttctcttttatagaaaagacttatttataatgcttattctagagtaaatttataagattgactttcaaaaaagttattatagaaaagacacaaattattatagatctaaaaaaaagcaaaaattattctgtattgaccatataccatttcatggtatattttctgaaatacttacctctccaatacatcaaaacaaatgagccacttgtcaacaaacaaaagcatgccaacataatagttgttcccaaaacaccaacaccatctaaccaatattgaaaaacccaagtgaaaaccgtaccaaacaaatttctagcaaataacactgatgtcattgtatcgtttgcctgttttggataacattctaacacataagtcaatgacaaagaactgatactacataatccaattgaaatcaaagcaataccaattgcaccaacaacccatgaagcaccatataatggacccaaaccatacatgaataacccaacaatattcaatactaatggaattgaaatcatcaataaacgaaattctggctcaaaaataccatcgtttcttttagtcatataaatttggaaagtatcagagaatgatgaatataaacctccaatgagtgtacctgcaaccattgctagatttaaaagacctaatgtacttggtgaaaaattgtatggtggtgccataaaaaattgagcttgtgtgacggaaattaatgataaccaacaaatttgcataccataaacaattgatgcccataaaactgctgggtatcttataacaattaatgttttaataatactgaatggagaaagtttgatatcattgaccgtaaatggatataatctttgtaaataagttttttgttcatctatttgttcaacagaatcaatcttgtcactatcactatatggtgcttcatttacaattacttgagatttttcattggaaagtaataagtgttgatcagtagtatttgtatggctatgcattgttctatttgacttcacaacttggagtaacttttcatcaagttcaaaagtatcttcagcttttcttgtaaagtaagattcttcaaggaaaaaaattgaacaactaataaaccaaagcaaataataattgagatatatccacaccataaataacctaaatctgatgtaatataacctgctaaaaatgggccaaatgcagaacctaaacctaaagttaaagtgtaaattccaataaacttaccatgatcgtgcaaaaagaaaatatcagcaattgaaacttcaaccattgaatcaataggaccagcagcaattccagccataacagagtatccaatgaatccagaataagtggttcgtgtaacaaaaataatgcaggcaataattataaatgttgaagaaagtagatagattggtcttctaccaatcttgcaagaaactggttggcatagcaaacaactaaaggctaaaaatagaaaagttaaacctttacctgtattcaacttgtttaaagatgcatcataaactacaccaagcaaggtgtagatggggccagtaaaatttgaacatgctgcaagaatcatggaaaaaaagaataaaatcataaagtgtaaaattttccgaaagtaagaccaatttaatggatcatttggacttttagatggttgaggaatcaaaataatatctgaatcctttttgttggaaattcctaaaccttcaatctcgtgttgttctccaaccaaaaccgtagttcctgggatggtaatatcatctttcaatgacttgtcttcggtaagaaacattgtttttcttttttcttgattgtttgttttttgatttgtcagaatacatgagaattaacacagttcaaaggtatttacaaagttgaaaatgttgttgcttttaaataaacaaagtttttcaacagcagtagtgatgataagaaataaagatagctgctatcatatctttatctgataagagtattagatggagatagaaataaatcaatttaacgctttcgaactcaaagtgaaaaaaagtttaaattgatctgacgttttttttattttgcgcagccgctactgataagaaaattgattttcccgattgggtctgataagtgtctgataagggtctgataagattatcttaagcgcttgcgttattctttcaattaggagctccgatataagaatatttaaatgaacacagcaatctactaactgaaaaataactttcatgtgtaaagataagtctcaaaaaaataacagcaattcaatgacaattacaacagattgggaaactgcagctaaaaacaagaagaaagaggttttatcaaacattccacatgaatggttactttctactgatttacttgaaaaatacaatgaaacaacatctgtttctgttttagatttgccaaaaaaaactaatgtctgctgaagaatttaaacttacagaaagttacacagctctggaattgttggaaaagcttaagagttcagaaatctcagctgttgacgttattgacgctttctctcatagagcagcaattgctactcaagttacaaattgttgtactgaacttatgtttgagtatggtaaaaaaagagctgagtttttagacaattatttagaagaaaataataaaccatatggaccacttcatggtttaccaatctcattaaaggatagtttcaatattcccggttatgattccacattgggatttgtttcaaaaatcaacaacaaaccacaaaataagagtgacttggttaaacaattggaaaacttgggtgctgttttctatgtgaaaactaatattccacaaactttaatgactgctgattcggagaataacatttttggtagaactctaaacccaaataatttaacattgacagcaggtggtagcagtggtggagaaggtgctttgattaaaatgaggggttcaattttaggaattggtactgatattgcaggttcgataagaattccagctttgtgtaatggcgtctatgggtacagaccaacttctagaagatgggcaatgagtaatcaaatgaatttatcaagagaagtctttgttgctgttgagccagttgcgggacctttagctgcagacttagaaacaatttcatttttaactgagattatttacaatgatagatcatggaggtatgactctgacaatttgaaaattgcttatcaagatccaaaaattaagtctggtgataaattatcagttggtattattatggaagatcctgatttaccagttcatccactaattaaaagaatcattaaagaggttgctgatattttatcttcaaagggacataccattgaatttgtcactgaatttccatcttatgacaaagcatgggaacttggatggtcgtctttccaaagcgatccaaagtcaacagcaattgaaaacttaacatgtactggtgaaagatttattaaatcactttgcttaccaggaatggatgtatatggaaaaggtccaactgatattgatgaacttataaaacttaaaactgaaatcaacaagtatatgaaagaatggacacaaatttacaatgaatatgatgttattatttctccaggctctcctggtactgcaccacctcatgatacatatggtattgcaccatataccaccatgttaaacatcttgaacttccctagtgttattattccatttggtaaggttgatccttctgttgataaaaccgatttaagtactgtttaccctgaaaaattagaacatatctatgcacactattcgttagatacttacaagggaggtcctggtcatattcaagtttcagcacctcatcttgaagatgaaaagcttcttgcatgttgctcaataatcgatgaagctttgaaaaaatgaccttgtttaaaataagggaaattttatatcgtatatcgtttttacttaatactttctaatttaactagaatttattttttacttaaagtattttaaatcaaatctatcagttcaaaaagatttgattaacattcatttcattttctagcatctctaaacctttattttgattccatgctagttttaggttatctatagctcgcaaatctccaacattatgtgtaatctcccactttttctctaagtaactcacaattttgtcttgatcaattttgttttccaaagttaaaccaatgataaatattccccataacttaaaaattccattttccatatcagactcgtccaagctattgaaaactaaaaaaaataactccttaagctttgcttgcaaatgggaaaatatctaaaagtaacattttacaacctatcagtgtgatgtagatcattttttgacctaattttatttcttgtttcaacaaatcattaaccgccagcaccagtgctgagtagaattcgttatcgtaagactttttcctgaatagaaatgatgttttagctacaataggtaaaacatctagtgtttcacctaataataagtttgactctgtagttgctttggttggaaaatgtgatctcaaaatgtcacataaaatgaacggatgatatttatttaaaagttccaatggtgttatgagtattgaaactgaataatggtagaataaactttcaattaacaaccttattgttcttgatgacttgatgttatttttacttagtatgagttcaacccctgtgtaaatatccttcaacaactcttcattgtttgagctcatgtatattttattcaaaatactaaatatgatggaatgtaatatccaatcaaatgaaccactcttattaaacgatctacgaacttgtatcattgcctttttatgaatctcattaataaccgcatgtttggaactgtcaacactataaagatatgcagctgataatgatgttaaaatatctctaaattctgtgcttttttgaaaagtttctagtgttaggtcagagatgacttgtaatgattcttttggaacgagtgatttaatagttacattaaaaaatatgttaaagagatgatcaaatggaacattatttaaaggaagtaatgctaaattttcacttattatcaccatttgattgttgtttctcaaaacctctaaattttcatgctcttcttttactaaattttgttgtattatatcactttttgcagttttgaaaacgcattgtatttgtttgccaacacatctattgcattgtggcttattttcatcgcattttttctttgctttgctacaagcaatgcatccatttctagatcttcttttagtctttaaagttacctgttccaaaatttcaacccctttatcatttatgaattgatttacagattgtttggcagtaccccaaatacattgaatatctttcttggaacataactgacatactggtttagtttcatcacactttttccttgataacctgcaagaaatacacccctgacttagatcttttaatttttccctgtgattttggcattgttgtggtatatattcaacaatattatgaaaaacgttaacgtcaatattgataaggtttgtttaaggtagacccttatctcaactcaaatcaaacatttttgttattacgtaatcaagattcattcaacatgaattatcaaatgttagagtcgattcattatatacgtacctttctgtatcttatatttattaacctatataacaattggaattgatagatagtaagacttagtttataattaattttgttctagaaaaagaaacaatataaaatatataaaataatcaatattaaaaattgaatcttgacctaaagtggagataacttttaaactgctaattgtattcatcatatagcaacaaaattaaatattacagtgccaaatttctccttaagagatatatcaatatctatcttcttttataaaatttatttattagtcgaatatggtattagaattgtggaagaatatgttgtaaggaaagaagaatatttgaaacatgattcaacaggattaggtatttagaatcattaattatttatgatggtgtatctcccagttttgtatctacttgtcctactatttcagaactactaatcatgtcagcactttgtaatatcttaaataatgaaaagttattggtataaaatagggggaataattttacaaatatagagataatttgtaattagtgattaatggatactaacaaataaatactaacagacaaaagctatttaattgacttctcccaataataatgttctgcagagtcatttgaagataaagcaaactgacatgtctgtatttgacctgtgtgtaaacatatggtaaaataaatattccttgttaagaggttataaaaaatgtttataaaatattaaataaaatcaataagattctttatcttgttttgctctcaaatcataaacagtttagtgcttcttctgcagctttgacaccagataaaaccattgcaccaaaagttggtcccattctattagaagaatcacattcactcaattccataccagcaacaatcaaacctggaaaaacttctctagtattcttcacgattgaatcttcagctaaattcatgtctaaacaacccatttgatttcttttaatgtaaccttggctaactaatctcttgacacaaaaagcacccattggaccatcatgtcctgtacatgaaataattaatttggaattaatagtgtttggatccatacatgattgatcatcatgatgcattgaaactaaagtccaattagtaacaacaccagcaactctaataccaccttctgatgtttttctagtaatcaaatcttcaacacaagttgcattgaaaagtttaacatttggtaattctaaaacttttgagcataatttagtaatgaaaagtgcagcatgtttaacaacaatgaaattaccttcatcttcataatcaatacctaattctttaataaaggtatcagctggttttcttaaaaccattgaggaaaataattgaccacctaaaaagcaacccccaccaacagcaacatttgcttcaacgatagcaatctttaaatctggtcttgattttgctaaaatatatgcagcagtcaaacctgaagatccggcaccaacaataacaatgtcaggattcagcatatttatctaaatcagcaaagtatctttttgtcattgcacgggaaacttgtgattctctgattggagcaaatttgaaagagtcccaatcgtaaactgcatcagtggcagttgctacttttgattcatcattgaaaacatttgcagttttcatagtgattggagtttgcgtaattgttgttgtagtactcctttaaaaaaataataggtatatttttaatgttagtgatttgttctctatgttggaaagttttgaaaagcacatacattttatgttgttttgttttgtgttattttatgaagttttagaagtattagttaaataccaaaaatgatttaacatggaagcatgcctatttatatacatataaaagtatttggattttgcttcttagctattttggcgaaagaatcaaaaggctggatagttttgaatttgaaaatgctacattactatcaatgaatccaaggtgtctagacacttacattattagtgcaattatggtttaatcaattaaggtaaaagagtggttattcagaaaaaggtataaaataaataaataaatataccccggagaaagcaaagttcattttttctattgttaaaatgcgatgattaggagatgactcacccgttgagacatttttcaatcattttgcacccctacaactatattttttcttgaagcacatgtgcaacaacgatctgaggcagtactgctacaatataattaacataaatctaaactaagtatgagttcacttcaactttaactttttccttcttctttgttgtcacttttcacaaaactccgaagtattaaaaatcactcaaatctcgtgatttaaagccacgccatttgtaagattttactatatacttctatttgtagtgagtagtgtaagaatttgtacgtagttttgccatatagctctaaattacgtatctgaattatgtagtgcaatacaatattttacaatttgacaaaaaaagcaccaaaaaaagcattgaaagaacatttgaaattgattcaatgttacaatttgtgatgctgttataataatgattcaatcaagatgaacccggacattgcaggttctcttattttcaaattgatagccacgtgtacccgtgtctaaccgaaagagtcctcaatgccgcaaatcttttgaaatgttacatcttttcacaaaatagcttctttttgatctattttaaagtttactgaatgtttgctattgtttcgatggccaggagcaatccactagtatcactttaaaaagagacatctgtcaccgactatagagtgcctttcattattctatatcttattacacagtaacaacaagaatgacaaccgcaaagcaacaacaaaaatcaactgaaaagattacattttccttaaactggggaccagcaccttaccatattccaatttatcttgctcaaactcaaggttactttaaagaggaaggattggatattgctattttagaaccttccaatccatcagatgttacagagttaattggctctggtaagattgacatgggattaaaagctaatgattcatactttagctgctaaggcaagaggttatcctgttacttctgttggttcattacttgatgaaccatttaccggggttttatacttaaagtcaagtggtattaccaacgattttgaaactatcaagggtaaaactattggttatgttggtgaatttggtaaaatccaattagatgaattatgtaaatatcatggtttaacaaagaatgattatactgctgttagatgtggtatgaatgttgctaaatatattttagaaggtaagattgatggtggtattggtattgaatgtatgcaacaagttgaattagaacaatattgtaaggcaaatggtcttgatgaaactgatgttcaaatgatgagaattgataaagtagcttgtcttggttgttgctgtttttgttctatctgttacatttgtaacgatgaatttttatcaaaaaatgaaagtaaggttaaggcatttttaagagctattaagaaagcaactgatgatgttatcaaatgatccaaagggcttcttggaagtaaatatgttgattttaaacctcaattagataatgaattatcttacaaacaatacgaaagatgctatgcttatttctctgcatctttattcaatgttcatagagattggaacaaggttactaactacggtaaaagacttgatattttaccagctgattacaagccaaactattcaaatgattacgttccaggtgttgaacctaaggaagttgatgatccacttgaagctcaaagattgatggcaattcatcaagaaaatgttagaaagaatggtggattttctagattataaatttagatcatcaagattgttatttaattttataattagttattgtatttaacctcatttttatctttattaattatatttcataaaatggctcacacaaaagtaacactatttttgagaacaagttatttgaatcatacacagtacctgaaaatttattaaaggaagggcaattacgtattttagatgtagatttcgaattcacttttaattacaataatatttgctgctcgtcttatcttatctaaatggtaatatccaatatcataagatcatatagatatattatcaaaatcaaatcattaaattcatcaagttatattatatttaaatgataaattaatcccatgattacattaattatcacttatgacaaattgactttccccaaaacttttactttataaccattatgttacttggatatctggcatataaaagaaatgtatagttattttttttttcaggattgatttgtattattcttcttttaaagtttactatttttattggatttttttattattaccaatcccaagtaaccaacaatcaaacaatcttaaaaaatgatctctgaaatcattaaattaaactccggacatgaagttccagctgttggtttaggcataagaaacagcaaaggatactggttatattgatttgattttgatgcatttaccacaatctaatgctgaaagaaaacatggtttatggattgcacttcaagaagtggttaaatcaggttcagctaaaagtattggtgtatataattatggtgttgaacatttaaaggaattattagcttatcctgatctaacttttaaaccagctgttaatcaagttgaaatagcaagaaaggatataactgaatattttaaggaaaataatattaaaattgaatcttattttccattagttaggtgtaaaaaatgatgaacatttagtttcattatcaaagaagtataataaaactccagcacaaattttacttagttggtcgtaaaggttatattgttttaccaaaagcttttacagcatcaagattagttcctaatttagtgcctacttcatttcaattaagtgatgaagatgaaagttgtactagttaagtgtcttatcttaggttaatttactatggaaacttaaaaaattaattatggaaattacgtaatacaaattggtggctcaacttctctttgtggtgtaagttctcctgataggaagatggaccatcttcaaaggtattcgtgttctgtaaaagtggggtgggtttttttatgggtattgtgagtgttcaacagtggatcttgttttaaaagagtttctagttgttgagttagaacagtttaaagtggcaaaagttgggtttttctaattatgtttttagtatcaatgattttagattcgtgttaactagattagttatttcagtttcagtttttgaaatttagtatattaattctagagtcaacgacacatccgtttgattcagttaaggcactcttttgttttttcgtgtttgctgatgctttatgtctaagtgacattcaaaaaaagttcgtattgatcaagttatgaccttttgtaaattaattttttcaatttttcaaagtatttcaccatcattataactatcaacttgcattattggactatttttatttcacttgcaattaatttaaacattatatcctgtgattgaatatcccaaaacattatctcaccaatttcattacctgaacaaatcaatgattcattattgaaaacaataaaacatgaacctaaacaatacttttctgctattggtaaattattatcatttttaaaagttccaacaactaaattattaatataatcccataatcttaaataaccatctaatgaacttgatagaatatattttgaatttggtgaaaatataacattactaattggaaatgatgagctaccttgtttatcataaattaaagttttcatgtatcagcaaatgataaatctaaactagaaattggatctgaatgagtacttgaaattctcatatttttacctctttttaaatcccaaattctaatagaaccagttattaaaattcttgacctttgatcaaattttaaacaattattgaaaaatgtatgatttctcagaatattagtagttttctcaatttcaattaaatcatctaatgctgatgttagatatttattgttgggtaaaaatgtaatattggaaatacctttaaaatgtccatttaatttacattttagtaaacctgtttttagataccatagtttaattgaattatcagttgaacatgttgcaattagttcaccatttgaacttattttaacttttgatgtaagattcatgttaactggatgttgtatttgtacattgtaataataaatattaaataaaccaattataactatatacaaaactgatggagttatttgattttccattttcaagagttaatatggcaaattcaaccgcacatcaaccacacatctgtttaattcagttaggacactcgtttgtttgtttgttcatgtttgctgatcattttgtattaagtttcacttgaaaagaccctctattgatgaagttatgacaaactaaaaattaaagatgtcagcgaatatacctcgaaaatcaggagaatttccaaaattatgctataggcgagtaatcacactgtgttaagatgatattattgagtaaagagaaatacttaattataaagtgttactataaacaaaaagaaaaaggaaaagaactataaaataataaagagcatcaagtatcccatcaactggttggaacccttggttttcttctaaacatcattccataatgaggtctgacatcaagcaccattttatcatgttttggtaaaccacatatatgggccagacatttttccaatggttcagtcagacaaggggcccaaggagtgataatttccatgtctgcatatttgattgcaagtaaactttcatcctcataattgaacctaagaattctcattaccttaataaaactccactctttcccgttcttgattttggcaaaacattgacaatcatcaagcttcaatttaagtgaacgaataaacacataatcgagttcaaaaacagaaattaactttttatcagaaataccaaactttcttgaggcttgatttaacaaagtgccaatcttatcaacatcggttaacttatctccaactttgtgcttataacaagacatattatcaattttcatcttgttgatcttcctcatatttgaatacaacaaaattggaagtcttattccaagagttatcattgtatgacgcccaggatgagacaaacttttcacctccttacaaaccctttcggttggaaaacaccaagtacaaacataagaaccaacatcacaccatttttcaaatatatggacaacgtagtgacttggaatacaagagacaacgttcaaaaatgagtacttcttgcttaagtcttctagtttcttcatcaattgaatataattattcttaagcaatggtatatcttcacgtggaacatcttcacacatgaaacaaagtaaatgttgattgatttcagcaagatattcaagaatttcagattggatattattcaaacctaaattacatttcaccatcaaaggaaaggcatgacaaaacagtttggaatctactgccttcagtcttgatttagcagcttctggggtaaagaatttatctaaattaccaggttcttcaaacatccctttactactaggaaaatttataattgaattaatactaaaaaccaatgctccaaacaatttcttatccaaaattttaaaacctttctctagtaatgctgcacatattcttttgggaaacatgttttctaaagcagcatgcatcagatctggtgaaacagaccgcataaagtcaagaccaataaaaacagtaaacatattatcacctttcatttttcaaatgccactttgagtagggaaatctcttctagccgcaatacctctaagctcctcagaagtaatcattgggttatcattgagatttttaaatgaaagtggagattccccagctttggtactaacctttttaatcttacaaaatgaacacggaaataaagccctttgccattgaagctctaaaccaccagctaatgaaggaatatctcctgtaaaggtgacgatgttggcatatattgtataagatacattattcaaatatactttgaaaccttcattccacaaatccatcagatccgtcattagaatcttcaaaaactacaacgtgtaagtagtcattaaggacctagtccgtttactattattacaagttatggtgtctataggtacacatttataataatatattgttgctcaacatgatttaactgttgtttgacgttcatactctgtatttggttggtttctcaagctagtaccaggaactatccttaccgctaagtcatatagtattaataaactgacatatataaatgcgtgttgctttttaaacagtgataatttaattcaatttaatttctggaccattaattcttagttacttatattacatggattaacttatcttaagaaattacattttgagaaaactaagtgtttttcagatatttgaagagtttggagtatggtatggtatggtgagaagagaaaattagcttattaaatatattctatcatattcaagaaaaccagtatttaatatattatattatgatattgtcattagtaaagaaaatgagatttgtaatactatttaaaggtcagtttattattaatagatgaaatttttgaatcattaatgaaaagtgttgatcataaaggtaaagaataatggtgtaaatattattgcatttattcaaaaggatttacatcaaggttgaaatgtacaagtattgttatcttattaccatatttatcttttaatggtatgttaaaaatgtttgaattaacaaataaaaattggtagagataataataatatattcatttacagatatattaacaattcaatcaacagtatcttcatatttataattgtttgactaatgaaagaaaaattaaaaactaataattccattagggattgtttagcatttgttgatatcaaatatttatcagtattgaagatagaaatattacaaagtttagtaaacttacgatcaataagttagttagaaaagttcttggtgctaaatttaattgtcaattacttgtacaaatttataatgaaggtactgatggttagtatagatatgatgaagaatgtcttaacttgggatagcttgtagaatgatgtttagattgaatcattgaagattataattataattataattagagtttatattaagaaatgtttataaattttagaaaattaccaaaaaagtgatggatttattaaatttttaaataattcatttattgaatgaatttattagttggttttgtcttaatgaattatatatatgtatgaagcttttccttttccttcatcttttacttttttttctttcttttactttgtttcatcttttatctttctttatctacttaatcaacagtcactgttcaaggcttatctatcatttctatattctatatctactatctaatataattaattttgaaggctcatcactttatttccacgcgttaaataaaataatggcggctcatcaaattaattacaccgaaattacatgttttactcttatccttaaggactgtgctattaatatctactacacttttacggtataaatttactttttaattctctattcattgatggtatttttcatataggttttagttgcaattttacaaaatgaaatttggtagttgaagtacttagaaatattaaaatgatttgatatctagtaattcttaagtcttcatttcttagaaattaaggatttttaccataaataattgactaaaatttatctctagatggttttagttattaacaataatcatattcactgtcaaaccactcaaaagtggtggaaatgttaacaaaatgtgaaactattgagattaagcaacaaataccatgtcatggcttatctaaggctcttcttgaatccgttgaaaaaataaatttttgagaaaagtacccttttttcgggtatttggtgatttattaatttaatcataaagaatatttcgggtacttgaaatgatgttaattgaaggttattgaggtcaactactacattatgattaacattataaataaacaactatagatcttatattgattagctttgatttgatttactcattctttaaataataaattaactttcacaatcaaatgtattaccatagaagttagtgatattttagtttaaaattggataggtgaatcatttcttttcaatcaagatgttgaagacaatgttataatgaaggagtggaatagttattaataacgaagattttaaatgttgaattataataattaagagtactccaatagtgaagatattaggtgaatggaatatcatgagttatattcataataacaatgaaaatagtagccaaattgagtatctgaacggttctactatgaacaataatactgcaaaataacattgatgctagatcacaatataaaactaaaaactaagtaagttaaagctagttcacaatataaaataaaaaactaagctaattaataatagactataatattaacttaaagaattagtacaaaattatagggaatgaatttttaaaataatattgaaggaataaactgatctgtcatatacttattccaatgagtcttctaattagttaatatagaacatttgtcatttgtcattttgtttcttaatacatagattactgaatattatatatgatgataacttgaatagttgtgaaaaccttgccattcaacattatcattagtaaagatacaacatgataaaaaaatctacattattaatcttaaaaattgacgatgaatttgaaagatgtagatggtgaattatgtgaaattatacgcttagatgaagagaaatcttatgaaccatcaaccaatgataatgaaaccaccagtttaccaaatgtaacagaattctgttgtattaagaaaaataatattgatgaggaatttatttaattattaatgtccacaatgagtatttttatgtttacaaaacataattcctttagtacatttgaaattggtttaatgctgaaataaacaatgctcgctatattaattgtgaatgttataagaatgatttgtagaaaaagaggatcaaaaatataaactgtacaatataataatatgagagtgttaaagaaaaagaagatcaataatgttgaaattaatgatatttgaagtgatgtctgggaattaaaacctttaattataatattcatagtattgctagttttattaaatgaactatataaccaatacttatgaaagtggaaatataaaacaatctaagtttgtattctgaatgtgaaagaagagcatataatcaatgataaagaaaaaatactaattacataaaatctttgatttagtatgatgaaaataatggtaatatctctttgattgaaacatcaaaattaaaattattcaattcattaggagaaaacctaaaataaaagatattcaaacaatgttgtttattcatcgtgtaaatgttcccgacgaaggagaaccaagactaacaaacataacattgcatatacatatatatatgtaacaagaagaaaaatggtactaattggggcattttttcttttatttcttgtttttgttatttattctattttatttaatactgggttattactttgtttaaaactatcaaatccacattcaaaaggattacttttttctatatattcagtactattacctacattttcatccattttactactttctactaactattatgaatattaaacctaataatcctactactattaaaaatcaattaaagatatcttgaaacatagaatataattagtataatatggaatgtttcttaaaattatgagcaagaatggtacaataattgtccatgtaagcatcaactgaacaagaactgatgcatttgcaaattgtgaaaaggttgtataagatttaatttttaggataataattgatagtatagtttcaaatgtcaatattaaagcagcattattgccgtaattgtgaatagataataaacaagtaaaagcagacaataaaattcatgtcaaagtatatgatcatcaagatttcgcagtggaaaaggtgattccgcctgtgccaaccttttaaagttattgttcatggaattaagtgaacaaatagcgatgtatttacacggatattaaacggaattacagtgcaaacggaaattacagtgcaaacggaaattaaactaaggaatgaaacttttcatagaatttgtgtataaatacagcaccctaatcagcttattgttggcctgactggtgaaagttgtactagaaattctttacagaacatcaaaagataatctaataattacaactgctaaaaacttaatctttatcaaaaatgtcttcaaatcctcctcaacaacactgctgtgctaataaggttattcacactggtactccaactggttcaattaaaacaatttctaacttaacttgctatgtaacttcaaattacaccccaaatgcaaaaaaattccttttcatattcactgatatattcggtttagatttagttaatactaaattagttgctgatacttttgcagaaaaattagattatcccgtcattattatggatatacttaataatgatatttatgttcttggtactgatttcgatgcttgggttgcaaatcatccacctgaattaacaactaaaatctgtgcagatttctttaaacaatttaaaattgatcatccaaatactgaatttttatcaggtattggttattgttttggtgctaaatacttatctcattatcttacatctgcaaatcctttacttgatgttggtgcatttgctcatccttcatttgtttcagatgatgaattaaaggcaattagtaaacctttaatcatttcatgtgctgaaactgataaaatcttcccaaaagatttaagatctgaaacagaggaaattttacaaaacaataaagttcactatcaattagatttatattctcatacaactcatggttttgctgttagaggtgatatgaatgatccattggttaaatatgctgctgaaaaagctttaattgatcaagtttattggtttaaatttcatgaaaataattgattaagtatcttcttatcttatatcttaccttatatcttattctattatatatatatatatatatatatatatatatatatagtctttttaaccaaatgagactacctagttatagtcacataacaccagcaatatgtaataaccgaacgtatattgatttagtgcccagtaatattccaatattcccagtagttcacgggcactccgcagtagctttatttcaagctgccggtgatattttttaattcccagtattttgatattgcccgtgtttcgtttattataaacatcttcaatgcatgttgctttattgtattatttttcttctgttagatcatcacaactgctaaaaacatcatcaatagagttagttttgtatatataatactgattttagtaatgtttgtggttatattgaaaactttggttttgttatactaaactataattattttagaaagaattttaaaagcatctattaaagtttatgtttcttaatactaaatgtggtactattaatgataaatctattgaatatattataattgaaacaaattcaagaaatattaaaccccataaatatatttacttaaatcaagatgaagaaaaattatttaacattatttctaacaagaaatttttatttaaaagagatgcaaatggatctttactatcatctattggttaatgattcaataaaggaaattaaataaacttagtgaactcaaaactgaatgaataaagtccttcttatttttcaaaaattagtatggcaatttagcaattaaattgttaaaagttcctttcggtattttaattatcaaggtttgtcatttgaaacagcctgaattaacaaaagtaagttaagttaaaaaataataagaactgatgaagttagaactatttaaagttgacaacgaaatatgacagttttctaactcctctgttttgcaacattaagcttcaaactaagttggaggtaaattgttggcatccgtttatagtattataaatctgcttgtcattagaacatgtgattaatagtaaaattaggctgtacaattaatgaatctttaaatattggataattattcggtggttgaatattcttagtaaatgattcactaacttcaatttttgatattcacttaaatttaaataatcaatcgtgaaacagtttaaaaaatatggtaaaatcattagtatgatatgattttgtagtaatgattaaagcagacaaatttttattaactgatgcaatctatattataaataaaaaattcaaactaatttcagtaaattagaatgaagatttgaaggattcattgtttaattcatttattagagaattaaaatatgctagatgaatttatgataaattaaaagacatgaaccaagtgaattagttgatggaaagttagataatgaatttctatgatggtcgtttattaataactaataaattgaaccatttaaagttaaacaagtgtaaagctatttgataaatgataaaacctcatgataccagagttaataattttaactaatgtattattccacgagactattgattatcatatggatcatagatggtcatcctttcaattcgtcgataaagaaagagtagttaataaaacagttaattaaaattcattaagagaacttccctcacatagtaaatattttcaacattttaattgtcagagtgttcttcttatagaatattggttcttttattaacaactggttaaatacattcataattaagtgtaatgaagtgtaaataatggtgatattgatttaaggttttgatgatatgatttgaatgagtataataataatggaattaataggatattattagaaccgttaagaattatcataataatgtaatatcatattttagttaatgtcaatttcaattgcaactgatatattcattgattaggcaaattagaaataattgaattataaattattgaaggttatgttagtttattaatgagttcaaactagataatagaacaatatttgaatatgatatttaattatagggtatgatacagttattaccaatagaatataaatgattgaatgttttcatttatgtgaattaagaatctgataatcagtcaattattaataacaacaacaacaacaataataacaacaatatacacatatagtatatctagaaaggatgatttctctatatctatatatactccacaaaagaaaacttcaaatgatcaaagtgataaaaaagcttattaatgagattactaatatatataattactaatataattactaacaatttattgcacctccccttcttcacttcccttttcttatataaatacctgcaatttgtacttataattgcttacaattgcctttacaatactcaacacttacaattcagtaattaatacaacacatacacatattatatacacatcacatcacatattataatgacagataagattgtaattgaaaattttgctaatgaagatggtgaatacaagagattggtatcatcatttagagacacaatttcaattaatggtaaatttaaacctgaacctaatagatatcatttatatgtctcatatgcatgtccttgggctcatcgtaccttaattacacgtattttaaaaggtttaacaaatataatcggagttactgtagttcattggcatatggataataatggttggagatttgcaacaaaggaagaaggtttaactgaagcaattgattcaactcctgatcctttatataatttcaaaagaattaaagaattatattttaaggcaaattcaaattatcaaggtagatttacagttccagttttatgggataagaaattagagacaattgttaataatgaaagttctgaaattattagaatattaaatactgaatttaattcaattattgatgaaaaatttgctaaaattgatatttatcctgaaagtttaaaaaatcaaattgatgaattaaatgattggatttatccaaatattaatagtggtgtctataaatcaggttttgcaacaaagcaagaaccatatgaaagagaagttaaaaatgttttcaaatatttagataaattagaagatttattaaaagagagacataataatggtgaaaaattcttattaggcaatttaatcaatgaagcagatattagattatttacaacattaattagatttgatcctgtttatcatcaacattttaaatgtaatattaaaatgattagacatgattatccaaatattaatcaatatttaaaagaattatattggaataataatccttttaaggatacaactaattttgaacatattaaatttcattatacaaaatcccatccacaaattaatccacatggaattacacctttaggtccaattccaaatattatgcctttataatcagtttagtataatataagttaatctatttatctttgaatttttcccatgcttcgtttaatgtaatgaaaaaaccatttgcaatcatgttattttcaattgttttattaccacttattcatataaaatattttaatttttatctaataccaaatcagttagttgggttagaaaaatgtcagtgaatttaatttacttagcatttgactttattttaatcttatactaaatcagattaatttaatattatagcaattaatatttttataataaccctatattgtatttaagcatgttcatctctttttgtttcaacttgtatgaggatgccaagtcgcattgccaagtcgcattttctgacaggtgccaattggcgtgtttcatgcgacttggccagatattgctgtagagtagttagatgatatgtagatggttggttgtgatggggttgatgagtagatgaaaactgtctacttcattagtctctaagtggtctggttgtcgagatatagacccctaagtacgtagaggagggggggtgtagtttagtatgtagaagggttgtttcttgtagttagatacatggttgtgttctcctgtgtctgtttagtagtagtagtgtttaagatagtaaacatgtggtgtgttcgtagagttacaggtggttcaatattatactagttaagtgtcttatcttaggataatttactatggaaatttgaaaaaattattataaaagttacgtaatctagttagtggctcaacttctctttgtagtggcaagttaagatgataggaagatgaaccatgtgtaatggtatttgtgttctgtaagagtagggtgggtttgtctgtgtgttgtgagtgttcaagagtgggtcttgtttcaaaagagtttgtagttgttgagttagaacaatttaaagtggcaaaagttgggtttttctaattaactttcaagtgttaatgattttagattcttgttaattagatgttgtatgagtacattgtgataattaataataagtaagtcgtttaaattaatgtttaaaattgatgaagttatttcattttcaattttttaaaatttgtatggcaattttagcaacatattaacatcacatctgtttgactcagttgaaacactcgtttgtttgttcgtgtttgcttatgatttctgtgtaggcttcatttgaaaagacttcgtattggtaaagttatgccaatttaaaaattgaaatttttagtattttcaaattgactttttaatagttgtattaatgattttaacttcaaagtagtttgatgttgcatcagaaagtattcctaattgcaaattaataaaccatttgatttaatattaaaaactaatgaagttaggttgatgtttttttttgaaaattagtatgacaatttagcaattaaatatttttatatctagttttggcaacagtttattatgtttagttaattaaagctttctgatttcaatgtagtaaatagaagtcaaaatggttaacaaccgatgaagttagaactgtttgaagttgatcatgtatgaaagtgcattttctaactcgttggtttttcaactttaagcttcaaactaagtcagagttgtcttatttgatgtttcttatggtataatgagtctacttgtcatcaatatatgtctaatagtgttagtttaatcaaactcaaaggaaaaagaagtgttagtaaaactgttaagctcactattaagaaatttctacatagtgattcttaccatagtaaattagtgttaaattaacagttttaatgggtgttgtttatggcttatacacaagatatatacttctagttagttggtttcgtatagaaagggcactggagattatggatatcaaaattagattgtctaaattgttctttaatctattacaatttgaaatttgtttctccccatagtaaattagtatgtcaatctgacaatttttttgttgatttcctccttattatctgatacgtttatatgttgtttgcttgattatttatagtatgtaaaaccaaatttcattgaaaaatgtctcttattgaaaaagttatgacatctcaaagttgaaattttgtaaattttctaattagctttctggttgttataataatgattttaagttcgtgttaattagatgttgtaatagtaaatgttggtaattgcaaataagtaaatcatttagattgacatttaaaactgataaagttatttcatttttaattttcaaaaatttgtatggcaatttcaaaaacatatcaaccttacatgtttttgtttcagttaaaacaaaaagctgtttaataactatttctgataacttagtattgagttttattaaaaaaaacttcttattgataaagttatgacaattcaaaaattaaaaatgtaaaattttctaattgactttttaatagttaaactaatgattttaaatccgtggtagttggatgtggtatcatttgcatgttctaatgaagatttgataaaccacttagattgatattcaaaactgatgaagtttagttgatgttgtattttgaaatttagtatgacaatttagcaattaaatattataatcttcatttttagcaacagtttatcatgtttagttaattaaaagtttctgatttcaatgcagcaagtagaagttgatttgattaagaaatggtgtagttattaaaggtcaaagttagcattgttaatatggccattttgtatcttctttgtttctcaactttaagcttcaaactaagtcagggttgtcttatttgatgtttcttatggtatagtgggtctacttgtcatcaatatatgtctaatagtgtcagtttaatcaaactctaaggaaaaaaaagtgttgataaaattgttaagtaaattgccttcatgaattctcactataattttttctcatagtaattcttaccatagtaaattattgttaaattggttctttcaagtgacaattatatgtgttatattaaagcttttaaacttgaacaaagcgctttcttacactacttgtattgatgaagatgaatatgtaattagattgctaaagttgtttatttaaaaattagaattttgggtttgtttcattgtagtaatttagtatgttatatcaactttcttttcttgtaactataattttaaattgttattctatatcacaaatggacctttattaatgatatctgatttttaaaaaataattacaaacttattacaatgtagtttatcaattgatactttgtcattctctaaaatcactgtttttcactttttaggtggctcgtcattttataaatgttgccatatctccttcaatcaagcttttttttaccattctttaagcttgatgttgatattcattactattagtatcctatatatgcttatttttatttaaataggcttcatggaacaagatataaccaatagtagatgaaacctctcaatatatgacataccccatgttgtcttaatatcctcaccatagtaatttttcacatagtaaatttagtatggtaaattaacagttttaatggatgttatttaggggttatatacaggatatacagttctagctagtaagattattatacaatgtgtattggagaatcagaatatgtaattactttgtccatattatttgtttgaaagttcaaatcttcaactcactttaataaatcaattaaattatcaatgtctttgtaatgacctgcaactgttctcgtttgtttatttagtcattcataacatttagtagtaattattattaaaaaagatgttatattggtaaagttatgatgttttgaagttcaatttttgactattttctaattaactttttaatcgttgtattgatgattttaaactcaggttaattaaatgttatatcattagtgtgcaataaagaagaattagtaaattgtgttaaataatattgcaaactaatgagttaatttctctttccatttcctaaatttattatggggaatctatcatcatatcaaccacacattggtttggttcagttataacacatgtttgtttgtttgttcataaaaatgatttagtgttaattttcatttaaaaagaccttctattgatgatattataccaatttgaaaataattttttttaaattttctaacaaaatttttatcagttctaacaacgatatcatattcgtgctaactagacgttgtattagaatgtttcaataatggccaatagccaaaccaactcaaactatattcaaaactgaatgaaaaaagtccttctcaatatttatgatttagtatggcaatttagcagttaaattgttttaatttcttttctgtattttaattatcaatatttgtcatttaaaacatgctgaactcataaaagtaagttgtgacgaaaaacattaagaactggtgaagttagaactggttgaagttggcaataaaatatgagtattttctaacccctctgtttttctactttaagctttaaactaagtcagagataaatttttggtatctgtttatggtgtaatgaatctaattgtcattagaacatgtcaattagtagtagtttaaacagatttaaggaaagaagaagtgttgatagttatcaaacatttggcctacatgaatttcctcactattaagaaattttacttagtaattcttatatcttagtaaaataagtgttaatttaagtgctttaattgatgttatttaaggcttatacataagatatacatttctagttagttaaagtgctatataaaatctgttaaagaattcaattgagtaaataaattgactaatttgttaatgaggttttatgaaagtattataatctgattttatgtttgaaaccagatgatagttataaagcctgatagtagttaccgtattttcggagtattgtaattaagtcttatattaatgaataattagattgttaataaatgacctttgatgtgttttattttaaagattttgggattttaaatattccatataatgcttattattcagtagagcttttataaaggttcaagattcaaacctttctgaaagtgaaagatgtgttctaggtatagtgtttaacatatgttattgttatcatattaaaagcacattagacaaaacttaggaagataaaatttaattgaaactaacgcaagtttgaaatagtatatttgaattattttcaataaacaattatcaatcacactagcaaaataatacattaatgaaccattatttcttcttcaaaccggatttgcagatatttcttcaattcaattaacttgaggctttccaatcaatgaaccagtaaatattcgatatttatttggcggtttaaattttatagtaaatgattcactaacttcaattttagatatacactgaaatttaaataatcaattgtgaaacagttcaaaaaatatggtacaattattggtatgatatgctttttatagtaatgaataaagcaggcagatgttaatattttattaattgatgcaatctatatcataaataaaaaacccaatctaattttagtgaataagaatgaaaatttaaaggatgaattgttcaagttagtatgttagatgaagttttgataagtgaaaaatgtaaattagttgatggaaaattagataatgaatttccatgatggtcttatattaataactaataaattgaaccatttaaagataaacaagtttaaagctttttgataaataataaaacctcatgacaccagttgtacagttactaattttgactaatctattattccacgagactattgattatcatatggattatagatggtcatccttttaattcgtccataaagaaagagtagttaataaaacagttgattaaaatttattaagagaacttccctcacacagtaaatattttcaacatgttaattaacagagttttcttcttagtggatattggttcttttattaacaactggttaaatacatttataattaagtgtgatgaagtgtgatcaataaaagtgatgttgctaatttaggcttccaaagatattatttaaattgatgtaatattactcttatttattggaattaatatgatactatcaaatgaatatgtgattaatccattgggagattaatagcacaaatttaataacataaatcccaatattacatataaatgatgaatgaaacgaatgtattagctatataatgtgaagttaaattatgcaactacctttttagtgtttatattgaggattatgttagttcatcatcgagtccaagccagataataaaacaatactggaatatatcaataaattgagatgcatctagtaaagtaatattggggcacatgaataaaatgatatacaaaagagacacatcgattattaatggaatataagtaatgaaattttttatttaagtgatttgtctggcaatgaacccattactaataacaaaaacaacaacaacaacaacaacaataatagtaatgataatttatatagctaaaagaaagcatttagtctattaaatttaccaatatgcaatttttgttatatttactaaaaatacatgctctttgtgttcaatactagatgattctattttggaaaattcaagcttaaaccttacttaaaattcagtagatttagtatctgttattttcattttaattattgattaatattgatatatccaactattaactcagatatagtaatattgagatggtcaataacaatacccaataatacggaatattattataagaaagaatgatctacatttctgttttatttccaatacactaatacagttaagcagtttgaggtttagcataaaggaatatttaatcaagtatctaggttcaaatgaataaaaactaatacaattaatagttaagttatgtaaacataaattataatatatgtactcattcccatttataaatgtaataagttaccaactgaaacaatattcaatagattgaagtatatctgaagcactaacaactaataatagttcagtgttaacaaacatcaatagtaatagtttattctttatataagtagggattctgtgtgagccaaaacattttgagaaaaccctcgttttttcggctaaacgtttattttttattttagatgacaattcttcttcgggtaattttggttttcggataatgttttgaatttttatttttttaacttcttcgcatgagtgatgactatagccgaaataaatgttgtacatatgacgattagccgaatattctattttatttattaacatggaattttttaagtttcaatgtattcatcttattccatagtcatttatattaagatagatacagttagtgattccttttagtgtatatactgttttattattgagtaaacatacccactatttagtccatcgtccattatatgtagaaaccacatattatgggtacaaatttattaaagaattatatagttactcatacaaaatttcagatatttcaaagccttgtcatgatagacaattaaagagtattttggtgtgttaagatataacatagtttgtttaaattacccataatagcataatattgttattgaaaataataacaaaattagtaataatgaatctgcaagaatagttaatgattactgatataataaaagaaacagtagtcggtaaataccattacatgttgtttatagcataatcattaattgctaagatagaaagtgtatatagatacataatttctcacttttaatttgattttctataatacaattatgaactcaaacgtatatgattatgaacaagatatattctaattttatagttctatattttgtaacatgaaatgtttttggtgtaataaagttgtgttcaaaggttcagcttgactctcataaatttgattcattcagcttctatagtcactcggtttttaataaaccaaatagtttgtgttgtatacttcactatccataataaagttaattaaaattagtagtaaccaactacatcgaatatatctttcagttttaacggcttactttagtacctgtagagaaatatattaaagtcaatagtaagtataattagtttctaacttagtgatgtattagtttatcatacaagaaagaaatgtataaacttttatagtgctatcagtgataatagttgaaattggctgaaaacatcaaataatcaagtttaatataattaaaatgatgcatttaattaatagaacaactgaatgatagattatagaacatataacgtatatttaaacaatagtatatgcaagatttcattaatttatatgccattcattaaacattataggatttaaatcgttgctattgtaatttttgatgtctatgtatccgttccaattgctagttttttactttttaacatttttggtttaattcaaaaaaacaaacataaaatgtgcaaaaaagtttcaaatactaaaaacaattttaaaatcatgttgtaaataaaactagaaattgtcataatttataagtttcctctatttaatgactaattataaagtacttattattagcatttagaatataacatatataaatatttatatcataaactagagcaccgaatttgcagtattatttcctaattgggtcaatatagtatataagtatatattatgacatgaatttatgttgtgaatgataataatttcagctatcgcgcggttttcaattagttgtgttttttacaaatttttttaagaaaattattctttcgcgtgggatttattatttttttattaaggtaacaacttttggtaaaaccatggtaaaaaaaagtacaaaaattattttaatttatctaaggttaaaataaaaattattgccacttgccagaattgaactagcgacctctgcattacaagtgcaacgctctaccactaagctaaagaggcaatttttggctgaaagtgaacggtcgtggttcgtcgttggatctttaatttataattggaactttagcttggtggaaacttgcttgattaactcattgtatagtttgctttaaggcttctttaatcataatttcgatttgttagaaaatgttttcacactttgttattttgtcttttgaattgtactatttttggattaatttcaacatatccgttcagtcttcttctgcataaaaatcataaaatatggggaagtaatattactattgaagaaactctttcaaatgaaatgttaaaggttgcaaaacctaaaataataaatgtaaatacagggaaaataataatcgatcttgaaccaaatatcaatttcaccatatagtgtataatgtaaaaacactaagaaaacggacggaatggccgcagttatgatttttgtttttctagcgcgggccatctcgttttgacattccgtttttttttacaggtccttctcgttttttttcaaccgaatggaaagtttagtagtgcgaagtatttattttttattttttcatgtctaacgttatatggcatttaagaaaagactaagaaagtcagcgaattggcaaaaaaaatttcccaaatttgtatgaggatgccaagtcgcattgccaagtcgcattttctgacaggtgccaaatggcgtgtttcatgcgacttggccagatattgctgtagagtagttagatggtatgtagatggttggttgtaatggggttgatgagtagatgaaaactgtctacttcattagtctctaagtggtctggttgtcgagatatagacccctaagtacgtagaggaggggggtgtagtttagtatgcagaagggttgtttcttgtagttagatacatggttgtgttctcctgtgtctgtttagtagtagtagtgaagtaggtcgcagggggggtatagtgaagtagatgtgaagtagtgaagtgaagtaggtcgcagggggggtatagtgaagtagtgaagtaggtggcagggggggtatagtgaagtaggtcgcagggggggtatagtgaagtagatcgcagggggggtatagtgaagtagtgaagtaggtcgcagggggggtatagtgaagtagtgaagtagtgaagtagtgaagtagtgaagtagatggtcgcaggggggtatagtgaagtagtgaagtaggtcgcagggggggtatagtgaagtagatgtgaagtagtgaagtagatcgcagggggggtatagtgaagtagtgaagtaggtcgcagggggggtatagtgaagtagatcgcagggggggtatagtgaagtgaagtagtgaagtaggtcgcagggggggtatagtgaagtagatcagtgaagtagtgaagtaggtcgcaggggggggtatagtgaagtagtgaagtaggtcgcagggggggtatagtgaagtagatcgcagggggggtatagtgaagtaggtcgcagggggggtatagtgaagtaggtcgcagggggggtatagtgaagtaggtcgcagggggggtatagtgaagtaggtcgcaggggggggtatagtgaagtaggtcgcagggggggtatagtgaagtaggtcgcaggggggggggtatagtgaagtaggtcgcagggggggtatagtgaagtaggtcgcagggggggtatagtgaagtaggtcgcagggggggtatagtgaagtaggtcgcaggggggtatagtgaagtaggtcgcagggggggtatagtgaagtaggtcgcaggggggggtatagtgaagtaggtcgcaggggggggtatagtgaagtaggtcgcagggggggggtatagtgaagtaggtcgcagggggggggtatagtgaagtaggtcgcagggggggtatagtgaagtaggtcgcaggggggggtatagtgaagtaggtcgcagggggggtatagtgaagtaggtcgcagggggggggtatagtgaagtaggtcgcagggggggtatagtgaagtaggtcgcagggggggtatagtgaagtaggtcgcaggggggggtatagtgaagtagatcgcaggggggtatagtgaagtagatcgcaggggggggtatagtgaagtaggtcgcaggggggtatagtgaagtagatcgcagggggggtatagtgaagtaggtcgcagggggggggtatagtgaagtaggtcgcaggggggggtatagtgaagtaggtcgcagggggggtatagtgaagtaggtcgcaggggggggtatagtgaagtaggtcgcagggggggtatagtgaagtaggtcgcagggggggtatagtgaagtaggtcgcagggggggtatagtgaagtaggtcgcaggggggggtatagtgaagtaggtcgcaggggggtatagtgaagtaggtcgcagggggggtatagtgaagtaggtcgcagggggggtatagtgaagtaggtcgcagggggggtatagtgaagtaggtcgcagggggggtatagtgaagtaggtcgcagggggggtatagtgaagtaggtcgcagggggggtatagtgaagtaggtcgcagggggggtatagtgaagtaggtcgcaggggggtatagtgaa

SEQ ID NO: 18 - DNA, 155285 bp, Pichia kluyveri
  >NCYC246_000007F P_kluyveri_NCYC246_TS
ttttacacccaaacactcgcatagacgttagactccttggtccatgtttcaagacgggcggtattgcgccgttgtgccagcatccgagacgaaacgagtccgccgcagccctcggtccccatacgcagcatctacaaaaggctataacactccgaggagccacattccaattgtccttatcctgcaacgaaaaccgatgctggcccaggaaaaacccagagcgccgcccacgagaggcaacgatgcgtaaatcccatgtcgagcccaatacccttccctttcaacaatttcacgtgctgtttcactctcttttcaaagtgcttttcatctttccttcacagtacttgttcgctatcggtctctcgccaatatttagccttagatggaatttaccacccacttagagctgcattcccaaacaactcgactcgtcagaagggcctcacaggtgtcgacatgcacgatacggggctctcaccctcagtggcaccctgttccaagggacttgcacacacgtctaacccgagactccaacctgcaatttacaactcgcacactaggtgagatttcaaatctgagctcttgccgcttcactcgccgctactgaggcaatccctgttggtttcttttcctccgcttattgatatgcttaagttcagcgggtattcctacctgatctgaggtcgagcttagttaaaagttcggcggccaaagcgttccaataatttagttcacttcgtccacgacgttccatttcgaaaaaggcatagcctgttctcaactctgcttgcgcaagaaggaaacgacgctcagacaggcatgccccatggaataccatggggcgcaatgtgcgttcaagaactcgatgattcacgatggctgcaattcacactaggtatcgcatttcgctgcgctcttcatcgatgcgagaaccaagagatccgttgttgaaagttttgttttgttaaaacttagtgactggtattattacaattttaggtgtttggtgcgctcacgcatgtgtataagatataaatcacagtaatgatccttccgcaggttcacctacggaaaccttgttacgacttttacgacctctaaatgaccaagtttgactgaattttcagcgccatgggaaagttgcccctcccgcggcgccaatcttggagcctcactaagccattcaatcggtagtagcgacgggcggtgtgtacaaagggcagggacgtaatcaacgcaagctgatgacttgcgcttactaggaattcctcgttgaagagcaaaaattacaatgctctatccccagcacgacggagtttcacgagattacccgggcctctcgaccaaggatatacttgctggctccgtcagtgtagcgcgcgtgcggcccagaacgtctaagggcatcacagacctgttgttgcctcaaacttccatgggtttgaaacccatagtccctctaagaagagcccacgagcagatgctcgcagccctatttagcaggttaaggtctcgtccgttatcgcaattaagcagacaaatcactccaaggactaaaaacggccatgcaccaccacccgtaagatcaagagaagtctctagcttgtcaatccttattacgtctggacctggtgagtttccccgtgttgagtcaaattaagccgcaggctccactcctggtggtgcccttccgtcaattcctttaagtttcagccttgcaaccatactccccccagaacccaaagactttgatttctcgtaaggtgccgagtgggcaagaagcgccacccgatccctagtcggcatagtttatggttaagactacgacggtatctgatcatcttcgatcccctaactttcgttcttgattaatgaaaacgtccttggcaaatgctttcgcagtagttagtcttcagttaatccaagaatttcacctctgacaactgaatactgatgcccccgaccgtccctattaatcattacgatggtcctagaaaccaacaaaatagaaccataacgtcctattctattattccatgctaatatatccgagcaaaggcctgctttgaacactctaatttcctcaaagtaatcgtcctggttcactccgaagagttagccagaaggaaaagacccggccgcaacagtacttaccataggtagaccgcccgcccaggcccaaagttcaactacgagctttttaactgcaacaactttaatatacgctattggagctggaattaccgcggctgctggcaccagacttgccctccaattgttcctcgttaaggtatttacattgtactcattccaattacaagaccaatggccctgtatcgttatatattgtcactacctccctgtgtcaggattgggtaatttgcgcgcctgctgccttccttggatgtggtagccgtttctcaggctccctctccggaatcgaacccttattccccgttacccgtgaaaaccatggtaggcctctatcctaccatcgaaagttgatagggcagaaatttgaatgaaccagctccagcacaaaggccatgagcttcgaaaagttattatgaatcatcaaaaggcccgagggcattgattttttatctaataaatacacccctcccgaagtcggggctttacgcatgtattagctctagattttccacggttatccatgtagaacggaactatcaaataaacgataactgatttaatgagccattcgcagtttcaccgtataatgcttatacttagacatgcatggcttaatctttgagacaagcatatgactactggcaggatcaaccagataactacgctcagatgagttttgttatgatgattggattaacctacacatagcactgtttgactttcttcaacggaggtcccctgtacaaagtacagcttcgtccgcttcagtggagagtggtcccagatgtcacgtttgcacggctacatctccaaccccgtccccaataaacctagtggtccgctggctatcagctagcaacccaccggccccgtcagtgcgcaccacggtcgcaagaccacaatgcccctgtccaagacttgcgtctcttgtccccggccatacccaagcttgtccgtagacgcccctgcatactctccgtgggatcttggcctatcggtgcacaacaccgctaagaaccgcattttttaagtgcttttctcatgtatatcccccggactgcgtaatcttgccaaaaattcgcagcgcgcgttggccgcggcgtccaggagttaaattggacttcgttttggcgtgcaatgttttcgagcgcgaggtgaagtttttctttttgtcaatgctgctgagccgtcagccgtgcatgcatttctaacaaatcccattttgcaaacttgcccaatatgccttcctacaccttcataattacatggcacactatacagagcatcctgatcaacatatctttgtaactaagcaataggacagaaactaggaaattttgatgtgtgttttccttcactgggcactgcccatggaatgtaatacttgcccgacaaaaactttcaatcttcccagcgaatctcaaaatttaaaaaaaattcaaaactctcacagtctacttcccacgaaattcccacttcactgggcaacaataccaacaccccccgtaactcccctctcaggccggattttccaattccaatctctgttctctactctccctggcctcttgtacctcctaccactctcagaatcctgacttagtgattttgaaatttctcatattgggtttctacccggcagctgcccatgaaaaaatgtctactgggcaactccccagtgaacaccctcgctgtgcatttttctcactttgccaaaatttccagccaagtactcacacaatttgtctgcttgcccacgaagggcctcttcactgggcacagctccactgggcactcccagtcaacttgcccatgaaaccacttctctccagatgaactttggttttggccaatttccattatgcccatgttaaacactgctcctagagagtaaaacacgctgatcaaaactatctacaaggcatgtctctagctggcgtggttgtcgagatattcactgttgaacttggcactctactaacttcacctatttatttctccacaaccagtgcgtctttcgctttgataattttatttcataataaacaccactggatctccacatcaagcatataatatcatcaaaaagaacatactttgttttttattacaccctccctgttgtacccatatcacactttacccttctaactcctccaatacgctaaaatatgcccatgttaaatctttaccactatattctacgctctctgttgcccatccaactctaaaaagtcaaaaaaaacaacataaaaaatacttcttccaactagtacatccatcaacacatattcccaatgaaattcttcacttacctcccatgaaaaataaaaaatcatattttcaccccttcttttgcctccataaaatttacacagatactcctgaacaatccgattccaacgcactgggtctcgtgtcctcagcacgtctgtagcccgagaaaaaaggcctttttcattttgacatccataataccgcccgaaatcgaacactgtcggttgcggccatatctagcagaaagcaccgtttcccgtccgatcaactgtagttaagctgctaagagcctgaccgagtagtgtagtgggagaccatatgcgaaactcaggtgctgcaatctttttttttcatagtatttttcatagtagtgtattttcctgtggcgtattgcgtattattttttgcggcgcatttctctcgtggaggctcgtcacttttttacggaggctcatctttttcagaatttctcgccaattttccgaacccaattttgcggaggctcgtcacttttttacggaggctcatctttttcagaatttctcgccaaatttccgaacccaaaattccggaggctcgtcactttcaaaaatttctcaaatttccgaacccaattttgcggaggctcgtcacttttcaccacgcgcgccaattttccgaacccaattttccgctgcgccacaggcaccgcatgcgccactactgcctgcaccgccacccgccaccgccacatttttccacttttcgtcgagtcgaaaaaattgttttttctcacgagcccctcgacttttttcttatcgtacgctgctgagccgctatcagtgtgctgagccgccacgccaagccgccacgacaccactttcgttgtcttttggttatgtccgttatcaccttctgtttactatcttcttactcccgcagtcattctacacactacatatacctacatgcgcacaaaaattcaggcttcacacccataccctacactagtgcatacctgctctggttgtccagatataagcgttcaaagttagtcaaaaatcccatattttgacctctaggtgtaaaataaattactttcttaataatttccaaaaagtgcgttttttactttttagctcttttttcgggtcgttgcgtctctacatactaattttcgtgctacagccgtgcagtgaaaatttttcaccaccatatttccctaatttctgtgcgtcacttgcctctttgggacgttcccagcccttttttccccaaacccctctgtccgcacgtgattctttctccagagtcaactccctctgactcttcttctctttggttctttaatatgactctgtgtcttgacttctacttattcacgtgattgaatcactggagtcatctcacgtgttattgcgctcaccacttcataactaattcagtaatcaagtcttaattaactaagcacaagtctacaggtctatactaatctccactgtacatcttaagtaatcactacactacgtaatcataagtcttaatctccgcgggccactgtacgtcttatgtaatcactacactacgtaatcataagtcttaatctcctctgacatcatagctattctccttatgtaatcaataatccctaccctaccactctcctcccttacgtaagcataaatcccgtctgacattatttgaaaaaatcctaagtccaaaacaggtaaaatatgcctacccagacgatcgacccaaatccaccacccccgtcctcacgtataccatacaccaagccacggactaggaattaatggcacccaacagcatcgcccaccacccggccacgccggcatccccaaatctcgccgaaatacccagctcgcatctgcaaactgcaacttcgccgccgaagcaacaaatcggacaacagaggcttaatctcagcagatcgtaacaacaaggctactctactgcttacaataccccgttgtacatctaagtcgtatgcaaaggatttatcctcgcgcatcctgacattgccatccgccggcaagcacacgcagcctttccgccacgcgcaccgctgccgacctactacggttctgcgacacaagtgccttattcttatccttctcaaatgtgcgagggcaagtaatcgtcgcgttctagcatggattctgacttagaggcgttcagccattatccagcagatggtagcttcgcggcagtgtctgctcagacagccgcaaaaaccaattatctgaatgaacggttcctctcgtactaagttcaattactattgcgacaacattcatcagtagggtaaaactaacctgtctcacgacggtctaaacccagctcacgttccctattagtgggtgaacaatccaacgcttaccgaattctgcttcggtatgataggaagagccgacatcgaagaatcaaaaagcaatgtcgctatgagcgcttgactgccacaagccagttatccctgtggtaacttttctggcacctctagcctcaaattccgagggactaaaggatcgataggccacactttcatggtttgtattcacactgaaaatcaaaatcaaggggacttttacccttttgttctactggagatttctgttctccatgagtcccccttaggacatctgcgttatcgtttaacagatgtgccgccccagccaaactccccacctgacaatgtcatcaacccggatcggcacacaagatgccttcgcactagaacgtggtcgtcaagaccagctccgcttcattgaataagtaaaaaaacgataaaggtagtggtatttcactggcgccggagctcccacttatgctacaccctctatgtcttttcacaatgtcaaactagagtcaagctcaacagggtcttctttccccgctgattctgccaagcccgttcccttggctgtggtttcgctagatagtagatagggacagtgggaatctcgttaatccattcatgcgcgtcactaattagatgacgaggcatttggctaccttaagagagtcatagttactcccgccgtttacccgcgcttggttgaatttcttcactttgacattcagagcactgggcagaaatcacattgcgtcaacatcactttctgaccatcgcaatgctatgttttaattagacagtcagattccccttgtccgtaccagttctaagttggttgttaaccgtggaggccgcaagcgcaagcgtagctagcagcaccgcccccgaagaagcagcgccagcacgcatggccagcacaggaagcacatccacccaacccttagagccaatccttatcccgaagttacggatctattttgccgacttcccttatctacattattctatcaactagaggctgttaaccttggagacctgctgcggttatgagtacgacttggcgtgaaaactattccttcctgcggattttcaaggaccgtcgcaagcgcaccggacgtcgcaaacaaaggcgacgctcttccagccataagaccccctctccggataaaccaattccagggtgataagctgttaagaagaaaagaaaactcctcccagggctcccgccggcgtctccgcattctgttacgttgccgtgaagaatccacatccaagttccggaattttaaccggattccctttcgatggtggtgcaaagaattgcacacgttgaaacggagcttccccatctcttaggatcgactaacccgcgtccaactgctgttgacgcggaacctttccccacttcagtcttcaaagttctcatttgaatatttgctactaccaccaagatctgcactaggggccgttcgacccaggctcacgcccaaggcttcgtcacaaacccccacgcctgcctactcgccaaggcatcacgccatggcggcaaagtataggtaacacgcttgagcgccatccattttcagggctagttcattcggccggtgagttgttacacactccttagcggattccgacttccatggccaccgtccggctgtctggatgaactaacaccttttgtggtgtctgatgagcgtgcattccggcaccttaactttgcgttcggttcatcccgcatcgccagttctgcttaccaaaaatggcccactaaaagctctgcattcaaacgtccgcgttcaataaagcaacagggacttcttacatatttaaagtttgagaatacgctaaggtcatttcgaccccgagacgtctaatcattcgctttacctcataaaactgatacgagcttctgctatcctgagggaaacttcggcaggaaccagctactagatggttcgattagtctttcgcccctatacccaaattcgacgatcgatttgcacgtcagaaccgctacgagcctccaccagagtttcctctggcttcaccctattcaggcatagttcaccatctttcgggtcccaacagctatgctcttactcaaatccatccgataaacatcaggatcggtcgatcgtgcccgcccccgagagagcggtccgacctacgttcactttcattacgcgtacgggttttacacccaaacactcgcatagacgttagactccttggtccatgtttcaagacgggcggtattgcgccgttgtgccagcatccgagacgaaacgagtccgccgcagccctcggtccccatacgcagcatctacaaaaggctataacactccgaggagccacattccaattgtccttatcctgcaacgaaaaccgatgctggcccaggaaaaacccagagcgccgcccacgagaggcaacgatgcgtaaatcccatgtcgagcccaatacccttccctttcaacaatttcacgtgctgtttcactctcttttcaaagtgcttttcatctttccttcacagtacttgttcgctatcggtctctcgccaatatttagccttagatggaatttaccacccacttagagctgcattcccaaacaactcgactcgtcagaagggcctcacaggtgtcgacatgcacgatacggggctctcaccctcagtggcaccctgttccaagggacttgcacacacgtctaacccgagactccaacctgcaatttacaactcgcacactaggtgagatttcaaatctgagctcttgccgcttcactcgccgctactgaggcaatccctgttggtttcttttcctccgcttattgatatgcttaagttcagcgggtattcctacctgatctgaggtcgagcttagttaaaagttcggcggccaaagcgttccaataatttagttcacttcgtccacgacgttccatttcgaaaaaggcatagcctgttctcaactctgcttgcgcaagaaggaaacgacgctcagacaggcatgccccatggaataccatggggcgcaatgtgcgttcaagaactcgatgattcacgatggctgcaattcacactaggtatcgcatttcgctgcgctcttcatcgatgcgagaaccaagagatccgttgttgaaagttttgttttgttaaaacttagtgactggtattattacaattttaggtgtttggtgcgctcacgcatgtgtataagatataaatcacagtaatgatccttccgcaggttcacctacggaaaccttgttacgacttttacgacctctaaatgaccaagtttgactgaattttcagcgccatgggaaagttgcccccccgcggcgccaatcttggagcctcactaagccattcaatcggtagtagcgacgggcggtgtgtacaaagggcagggacgtaatcaacgcaagctgatgacttgcgcttactaggaattcctcgttgaagagcaaaaattacaatgctctatccccagcacgacggagtttcacgagattacccgggcctctcgaccaaggatatacttgctggctccgtcagtgtagcgcgcgtgcggcccagaacgtctaagggcatcacagacctgttgttgcctcaaacttccatgggtttgaaacccatagtccctctaagaagagcccacgagcagatgctcgcagccctatttagcaggttaaggtctcgtccgttatcgcaattaagcagacaaatcactccaaggactaaaaacggccatgcaccaccacccgtaagatcaagagaagtctctagcttgtcaatccttattacgtctggacctggtgagtttccccgtgttgagtcaaattaagccgcaggctccactcctggtggtgcccttccgtcaattcctttaagtttcagccttgcaaccatactccccccagaacccaaagactttgatttctcgtaaggtgccgagtgggcaagaagcgccacccgatccctagtcggcatagtttatggttaagactacgacggtatctgatcatcttcgatcccctaactttcgttcttgattaatgaaaacgtccttggcaaatgctttcgcagtagttagtcttcagttaatccaagaatttcacctctgacaactgaatactgatgcccccgaccgtccctattaatcattacgatggtcctagaaaccaacaaaatagaaccataacgtcctattctattattccatgctaatatatccgagcaaaggcctgctttgaacactctaatttcctcaaagtaatcgtcctggttcactccgaagagttagccagaaggaaaagacccggccgcaacagtacttaccataggtagaccgcccgcccaggcccaaagttcaactacgagctttttaactgcaacaactttaatatacgctattggagctggaattaccgcggctgctggcaccagacttgccctccaattgttcctcgttaaggtatttacattgtactcattccaattacaagaccaatggccctgtatcgttatatattgtcactacctccctgtgtcaggattgggtaatttgcgcgcctgctgccttccttggatgtggtagccgtttctcaggctccctctccggaatcgaacccttattccccgttacccgtgaaaaccatggtaggcctctatcctaccatcgaaagttgatagggcagaaatttgaatgaaccagctccagcacaaaggccatgagcttcgaaaagttattatgaatcatcaaaaggcccgagggcattgattttttatctaataaatacacccctcccgaagtcggggctttacgcatgtattagctctagattttccacggttatccatgtagaacggaactatcaaataaacgataactgatttaatgagccattcgcagtttcaccgtataatgcttatacttagacatgcatggcttaatctttgagacaagcatatgactactggcaggatcaaccagataactacgctcagatgagttttgttatgatgattggattaacctacacatagcactgtttgactttcttcaacggaggtcccctgtacaaagtacagcttcgtccgcttcagtggagagtggtcccagatgtcacgtttgcacggctacatctccaaccccgtccccaataaacctagtggtccgctggctatcagctagcaacccaccggccccgtcagtgcgcaccacggtcgcaagaccacaatgcccctgtccaagacttgcgtctcttgtccccggccatacccaagcttgtccgtagacgcccctgcatactctccgtgggatcttggcctatcggtgcacaacaccgctaagaaccgcattttttaagtgcttttctcatgtatatcccccggactgcgtaatcttgccaaaaattcgcagcgcgcgttggccgcggcgtccaggagttaaattggacttcgttttggcgtgcaatgttttcgagcgcgaggtgaagtttttctttttgtcaatgctgctgagccgtcagccgtgcatgcatttctaacaaatcccattttgcaaacttgcccaatatgccttcctacaccttcataattacatggcacactatacagagcatcctgatcaacatatctttgtaactaagcaataggacagaaactaggaaattttgatgtgtgttttccttcactgggcactgcccatggaatgtaatacttgcccgacaaaaactttcaatcttcccagcgaatctcaaaatttaaaaaaaattcaaaactctcacagtctacttcccacgaaattcccacttcactgggcaacaataccaacaccccccgtaactcccctctcaggccggattttccaattccaatctctgttctctactctccctggcctcttgtacctcctaccactctcagaatcctgacttagtgattttgaaatttctcatattgggtttctacccggcagctgcccatgaaaaaatgtctactgggcaactccccagtgaacaccctcgctgtgcatttttctcactttgccaaaatttccagccaagtactcacacaatttgtctgcttgcccacgaagggcctcttcactgggcacagctccactgggcactcccagtcaacttgcccatgaaaccacttctctccagatgaactttggttttggccaatttccattatgcccatgttaaacactgctcctagagagtaaaacacgctgatcaaaactatctacaaggcatgtctctagctggcgtggttgtcgagatattcactgttgaacttggcactctactaacttcacctatttatttctccacaaccagtgcgtctttcgctttgataattttatttcataataaacaccactggatctccacatcaagcatataatatcatcaaaaagaacatactttgttttttattacaccctccctgttgtacccatatcacactttacccttctaactcctccaatacgctaaaatatgcccatgttaaatctttaccactatattctacgctctctgttgcccatccaactctaaaaagtcaaaaaaaacaacataaaaaatacttcttccaactagtacatccatcaacacacatattcccaatgaaattcttcacttacctcccatgaaaaataaaaaatcatattttcaccccttcttttgcctccataaaatttacacagatactcctgaacaatccgattccaacgcactgggtctcgtgtcctcagcacgtctgtagcccgagaaaaaaggcctttttcattttgacatccataataccgcccgaaatcgaacactgtcggttgcggccatatctagcagaaagcaccgtttcccgtccgatcaactgtagttaagctgctaagagcctgaccgagtagtgtagtgggagaccatatgcgaaactcaggtgctgcaatctttttttttcatagtatttttcatagtagtgtattttcctgtggcgtattgcgtattattttttgcggcgcatttctctcgtggaggctcgtcacttttttacggaggctcatctttttcagaatttctcgccaattttccgaacccaattttgcggaggctcgtcacttttttacggaggctcatctttttcagaatttctcgccaaatttccgaacccaaaattccggaggctcgtcactttcaaaaatttctcaaatttccgaacccaattttgcggaggctcgtcacttttcaccacgcgcgccaattttccgaacccaattttccgctgcgccacaggcaccgcatgcgccactactgcctgcaccgccacccgccaccgccacatttttccacttttcgtcgagtcgaaaaaattgttttttctcacgagcccctcgacttttttcttatcgtacgctgctgagccgctatcagtgtgctgagccgccacgccaagccgccacgacaccactttcgttgtcttttggttatgtccgttatcaccttctgtttactatcttcttactcccgcagtcattctacacactacatatacctacatgcgcacaaaaattcaggcttcacacccataccctacactagtgcatacctgctctggttgtccagatataagcgttcaaagttagtcaaaaatcccatattttgacctctaggtgtaaaataaattactttcttaataatttccaaaaagtgcgttttttactttttagctcttttttcgggtcgttgcgtctctacatactaattttcgtgctacagccgtgcagtgaaaatttttcaccaccatatttccctaatttctgtgcgtcacttgcctctttgggacgttcccagcccttttttccccaaacccctctgtccgcacgtgattctttctccagagtcaactccctctgactcttcttctctttggttctttaatatgactctgtgtcttgacttctacttattcacgtgattgaatcactggagtcatctcacgtgttattgcgctcaccacttcataactaattcagtaatcaagtcttaattaactaagcacaagtctacaggtctatactaatctccactgtacatcttaagtaatcactacactacgtaatcataagtcttaatctccgcgggccactgtacgtcttatgtaatcactacactacgtaatcataagtcttaatctcctctgacatcatagctattctccttatgtaatcaataatccctaccctaccactctcctcccttacgtaagcataaatcccgtctgacattatttgaaaaaatcctaagtccaaaacaggtaaaatatgcctacccagacgatcgacccaaatccaccacccccgtcctcacgtataccatacaccaagccacggactaggaattaatggcacccaacagcatcgcccaccacccggccacgccggcatccccaaatctcgccgaaatacccagctcgcatctgcaaactgcaacttcgccgccgaagcaacaaatcggacaacagaggcttaatctcagcagatcgtaacaacaaggctactctactgcttacaataccccgttgtacatctaagtcgtatgcaaaggatttatcctcgcgcatcctgacattgccatccgccggcaagcacacgcagcctttccgccacgcgcaccgctgccgacctactacggttctgcgacacaagtgccttattcttatccttctcaaatgtgcgagggcaagtaatcgtcgcgttctagcatggattctgacttagaggcgttcagccattatccagcagatggtagcttcgcggcagtgtctgctcagacagccgcaaaaaccaattatctgaatgaacggttcctctcgtactaagttcaattactattgcgacaacattcatcagtagggtaaaactaacctgtctcacgacggtctaaacccagctcacgttccctattagtgggtgaacaatccaacgcttaccgaattctgcttcggtatgataggaagagccgacatcgaagaatcaaaaagcaatgtcgctatgagcgcttgactgccacaagccagttatccctgtggtaacttttctggcacctctagcctcaaattccgagggactaaaggatcgataggccacactttcatggtttgtattcacactgaaaatcaaaatcaaggggacttttacccttttgttctactggagatttctgttctccatgagtcccccttaggacatctgcgttatcgtttaacagatgtgccgccccagccaaactccccacctgacaatgtcatcaacccggatcggcacacaagatgccttcgcactagaacgtggtcgtcaagaccagctccgcttcattgaataagtaaaaaaacgataaaggtagtggtatttcactggcgccggagctcccacttatgctacaccctctatgtcttttcacaatgtcaaactagagtcaagctcaacagggtcttctttccccgctgattctgccaagcccgttcccttggctgtggtttcgctagatagtagatagggacagtgggaatctcgttaatccattcatgcgcgtcactaattagatgacgaggcatttggctaccttaagagagtcatagttactcccgccgtttacccgcgcttggttgaatttcttcactttgacattcagagcactgggcagaaatcacattgcgtcaacatcactttctgaccatcgcaatgctatgttttaattagacagtcagattccccttgtccgtaccagttctaagttggttgttaaccgtggaggccgcaagcgcaagcgtagctagcagcaccgcccccgaagaagcagcgccagcacgcatggccagcacaggaagcacatccacccaacccttagagccaatccttatcccgaagttacggatctattttgccgacttcccttatctacattattctatcaactagaggctgttaaccttggagacctgctgcggttatgagtacgacttggcgtgaaaactattccttcctgcggattttcaaggaccgtcgcaagcgcaccggacgtcgcaaacaaaggcgacgctcttccagccataagaccccctctccggataaaccaattccagggtgataagctgttaagaagaaaagaaaactcctcccagggctcccgccggcgtctccgcattctgttacgttgccgtgaagaatccacatccaagttccggaattttaaccggattccctttcgatggtggtgcaaagaattgcacacgttgaaacggagcttccccatctcttaggatcgactaacccgcgtccaactgctgttgacgcggaacctttccccacttcagtcttcaaagttctcatttgaatatttgctactaccaccaagatctgcactaggggccgttcgacccaggctcacgcccaaggcttcgtcacaaacccccacgcctgcctactcgccaaggcatcacgccatggcggcaaagtataggtaacacgcttgagcgccatccattttcagggctagttcattcggccggtgagttgttacacactccttagcggattccgacttccatggccaccgtccggctgtctggatgaactaacaccttttgtggtgtctgatgagcgtgcattccggcaccttaactttgcgttcggttcatcccgcatcgccagttctgcttaccaaaaatggcccactaaaagctctgcattcaaacgtccgcgttcaataaagcaacagggacttcttacatatttaaagtttgagaatacgctaaggtcatttcgaccccgagacgtctaatcattcgctttacctcataaaactgatacgagcttctgctatcctgagggaaacttcggcaggaaccagctactagatggttcgattagtctttcgcccctatacccaaattcgacgatcgatttgcacgtcagaaccgctacgagcctccaccagagtttcctctggcttcaccctattcaggcatagttcaccatctttcgggtcccaacagctatgctcttactcaaatccatccgataaacatcaggatcggtcgatcgtgcccgcccccgagagagcggtccgacctacgttcactttcattacgcgtacgggttttacacccaaacactcgcatagacgttagactccttggtccatgtttcaagacgggcggtattgcgccgttgtgccagcatccgagacgaaacgagtccgccgcagccctcggtccccatacgcagcatctacaaaaggctataacactccgaggagccacattccaattgtccttatcctgcaacgaaaaccgatgctggcccaggaaaaacccagagcgccgcccacgagaggcaacgatgcgtaaatcccatgtcgagcccaatacccttccctttcaacaatttcacgtgctgtttcactctcttttcaaagtgcttttcatctttccttcacagtacttgttcgctatcggtctctcgccaatatttagccttagatggaatttaccacccacttagagctgcattcccaaacaactcgactcgtcagaagggcctcacaggtgtcgacatgcacgatacggggctctcaccctcagtggcaccctgttccaagggacttgcacacacgtctaacccgagactccaacctgcaatttacaactcgcacactaggtgagatttcaaatctgagctcttgccgcttcactcgccgctactgaggcaatccctgttggtttcttttcctccgcttattgatatgcttaagttcagcgggtattcctacctgatctgaggtcgagcttagttaaaagttcggcggccaaagcgttccaataatttagttcacttcgtccacgacgttccatttcgaaaaaggcatagcctgttctcaactctgcttgcgcaagaaggaaacgacgctcagacaggcatgccccatggaataccatggggcgcaatgtgcgttcaagaactcgatgattcacgatggctgcaattcacactaggtatcgcatttcgctgcgctcttcatcgatgcgagaaccaagagatccgttgttgaaagttttgttttgttaaaacttagtgactggtattattacaattttaggtgtttggtgcgctcacgcatgtgtataagatataaatcacagtaatgatccttccgcaggttcacctacggaaaccttgttacgacttttacgacctctaaatgaccaagtttgactgaattttcagcgccatgggaaagttgcccctcccgcggcgccaatcttggagcctcactaagccattcaatcggtagtagcgacgggcggtgtgtacaaagggcagggacgtaatcaacgcaagctgatgacttgcgcttactaggaattcctcgttgaagagcaaaaattacaatgctctatccccagcacgacggagtttcacgagattacccgggcctctcgaccaaggatatacttgctggctccgtcagtgtagcgcgcgtgcggcccagaacgtctaagggcatcacagacctgttgttgcctcaaacttccatgggtttgaaacccatagtccctctaagaagagcccacgagcagatgctcgcagccctatttagcaggttaaggtctcgtccgttatcgcaattaagcagacaaatcactccaaggactaaaaacggccatgcaccaccacccgtaagatcaagagaagtctctagcttgtcaatccttattacgtctggacctggtgagtttccccgtgttgagtcaaattaagccgcaggctccactcctggtggtgcccttccgtcaattcctttaagtttcagccttgcaaccatactccccccagaacccaaagactttgatttctcgtaaggtgccgagtgggcaagaagcgccacccgatccctagtcggcatagtttatggttaagactacgacggtatctgatcatcttcgatcccctaactttcgttcttgattaatgaaaacgtccttggcaaatgctttcgcagtagttagtcttcagttaatccaagaatttcacctctgacaactgaatactgatgcccccgaccgtccctattaatcattacgatggtcctagaaaccaacaaaatagaaccataacgtcctattctattattccatgctaatatatccgagcaaaggcctgctttgaacactctaatttcctcaaagtaatcgtcctggttcactccgaagagttagccagaaggaaaagacccggccgcaacagtacttaccataggtagaccgcccgcccaggcccaaagttcaactacgagctttttaactgcaacaactttaatatacgctattggagctggaattaccgcggctgctggcaccagacttgccctccaattgttcctcgttaaggtatttacattgtactcattccaattacaagaccaatggccctgtatcgttatatattgtcactacctccctgtgtcaggattgggtaatttgcgcgcctgctgccttccttggatgtggtagccgtttctcaggctccctctccggaatcgaacccttattccccgttacccgtgaaaaccatggtaggcctctatcctaccatcgaaagttgatagggcagaaatttgaatgaaccagctccagcacaaaggccatgagcttcgaaaagttattatgaatcatcaaaaggcccgagggcattgattttttatctaataaatacacccctcccgaagtcggggctttacgcatgtattagctctagattttccacggttatccatgtagaacggaactatcaaataaacgataactgatttaatgagccattcgcagtttcaccgtataatgcttatacttagacatgcatggcttaatctttgagacaagcatatgactactggcaggatcaaccagataactacgctcagatgagttttgttatgatgattggattaacctacacatagcactgtttgactttcttcaacggaggtcccctgtacaaagtacagcttcgtccgcttcagtggagagtggtcccagatgtcacgtttgcacggctacatctccaaccccgtccccaataaacctagtggtccgctggctatcagctagcaacccaccggccccgtcagtgcgcaccacggtcgcaagaccacaatgcccctgtccaagacttgcgtctcttgtccccggccatacccaagcttgtccgtagacgcccctgcatactctccgtgggatcttggcctatcggtgcacaacaccgctaagaaccgcattttttaagtgcttttctcatgtatatcccccggactgcgtaatcttgccaaaaattcgcagcgcgcgttggccgcggcgtccaggagttaaattggacttcgttttggcgtgcaatgttttcgagcgcgaggtgaagtttttctttttgtcaatgctgctgagccgtcagccgtgcatgcatttctaacaaatcccattttgcaaacttgcccaatatgccttcctacaccttcataattacatggcacactatacagagcatcctgatcaacatatctttgtaactaagcaataggacagaaactaggaaattttgatgtgtgttttccttcactgggcactgcccatggaatgtaatacttgcccgacaaaaactttcaatcttcccagcgaatctcaaaatttaaaaaaaattcaaaactctcacagtctacttcccacgaattcccacttcactgggcaacaataccaacaccccccgtaactcccctctcaggccggattttccaattccaatctctgttctctactctccctggcctcttgtacctcctaccactctcagaatcctgacttagtgattttgaaatttctcatattgggtttctacccggcagctgcccatgaaaaaatgtctactgggcaactccccagtgaacaccctcgctgtgcatttttctcactttgccaaaatttccagccaagtactcacacaatttgtctgcttgcccacgaagggcctcttcactgggcacagctccactgggcactcccagtcaacttgcccatgaaaccacttctctccagatgaactttggttttggccaatttccattatgcccatgttaaacactgctcctagagagtaaaacacgctgatcaaaactatctacaaggcatgtctctagctggcgtggttgtcgagatattcactgttgaacttggcactctactaacttcacctatttatttctccacaaccagtgcgtctttcgctttgataattttatttcataataaacaccactggatctccacatcaagcatataatatcatcaaaaagaacatactttgttttttattacaccctccctgttgtacccatatcacactttacccttctaactcctccaatacgctaaaatatgcccatgttaaatctttaccactatattctacgctctctgttgcccatccaactctaaaaagtcaaaaaaaacaacataaaaaatacttcttccaactagtacatccatcaacacacatattcccaatgaaattcttcacttacctcccatgaaaaataaaaatcatattttcaccccttcttttgcctccataaaatttacacagatactcctgaacaatccgattccaacgcactgggtctcgtgtcctcagcacgtctgtagcccgagaaaaaaggcctttttcattttgacatccataataccgcccgaaatcgaacactgtcggttgcggccatatctagcagaaagcaccgtttcccgtccgatcaactgtagttaagctgctaagagcctgaccgagtagtgtagtgggagaccatatgcgaaactcaggtgctgcaatcttttttttcatagtatttttcatagtagtgtattttcctgtggcgtattgcgtattattttttgcggcgcatttctctcgtggaggctcgtcacttttttacggaggctcatctttttcagaatttctcgccaattttccgaacccaattttgcggaggctcgtcacttttttacggaggctcatctttttcagaatttctcgccaaatttccgaacccaaaattccggaggctcgtcactttcaaaaatttctcaaatttccgaacccaattttgcggaggctcgtcacttttcaccacgcgcgccaattttccgaacccaattttccgctgcgccacaggcaccgcatgcgccactactgcctgcaccgccacccgccaccgccacatttttccacttttcgtcgagtcgaaaaaattgttttttctcacgagcccctcgacttttttcttatcgtacgctgctgagccgctatcagtgtgctgagccgccacgccaagccgccacgacaccactttcgttgtcttttggttatgtccgttatcaccttctgtttactatcttcttactcccgcagtcattctacacactacatatacctacatgcgcacaaaaattcaggcttcacacccataccctacactagtgcatacctgctctggttgtccagatataagcgttcaaagttagtcaaaaatcccatattttgacctctaggtgtaaaataaattactttcttaataatttccaaaaagtgcgttttttactttttagctcttttttcgggtcgttgcgtctctacatactaattttcgtgctacagccgtgcagtgaaaatttttcaccaccatatttccctaatttctgtgcgtcacttgcctctttgggacgttcccagcccttttttccccaaacccctctgtccgcacgtgattctttctccagagtcaactccctctgactcttcttctctttggttctttaatatgactctgtgtcttgacttctacttattcacgtgattgaatcactggagtcatctcacgtgttattgcgctcaccacttcataactaattcagtaatcaagtcttaattaactaagcacaagtctacaggtctatactaatctccactgtacatcttaagtaatcactacactacgtaatcataagtcttaatctccgcgggccactgtacgtcttatgtaatcactacactacgtaatcataagtcttaatctcctctgacatcatagctattctccttatgtaatcaataatccctaccctaccactctcctcccttacgtaagcataaatcccgtctgacattatttgaaaaaatcctaagtccaaaacaggtaaaatatgcctacccagacgatcgacccaaatccaccacccccgtcctcacgtataccatacaccaagccacggactaggaattaatggcacccaacagcatcgcccaccacccggccacgccggcatccccaaatctcgccgaaatacccagctcgcatctgcaaactgcaacttcgccgccgaagcaacaaatcggacaacagaggcttaatctcagcagatcgtaacaacaaggctactctactgcttacaataccccgttgtacatctaagtcgtatgcaaaggatttatcctcgcgcatcctgacattgccatccgccggcaagcacacgcagcctttccgccacgcgcaccgctgccgacctactacggttctgcgacacaagtgccttattcttatccttctcaaatgtgcgagggcaagtaatcgtcgcgttctagcatggattctgacttagaggcgttcagccattatccagcagatggtagcttcgcggcagtgtctgctcagacagccgcaaaaaccaattatctgaatgaacggttcctctcgtactaagttcaattactattgcgacaacattcatcagtagggtaaaactaacctgtctcacgacggtctaaacccagctcacgttccctattagtgggtgaacaatccaacgcttaccgaattctgcttcggtatgataggaagagccgacatcgaagaatcaaaaagcaatgtcgctatgagcgcttgactgccacaagccagttatccctgtggtaacttttctggcacctctagcctcaaattccgagggactaaaggatcgataggccacactttcatggtttgtattcacactgaaaatcaaaatcaaggggacttttacccttttgttctactggagatttctgttctccatgagtcccccttaggacatctgcgttatcgtttaacagatgtgccgccccagccaaactccccacctgacaatgtcatcaacccggatcggcacacaagatgccttcgcactagaacgtggtcgtcaagaccagctccgcttcattgaataagtaaaaaaacgataaaggtagtggtatttcactggcgccggagctcccacttatgctacaccctctatgtcttttcacaatgtcaaactagagtcaagctcaacagggtcttctttccccgctgattctgccaagcccgttcccttggctgtggtttcgctagatagtagatagggacagtgggaatctcgttaatccattcatgcgcgtcactaattagatgacgaggcatttggctaccttaagaagtcatagttactcccgccgtttacccgcgcttggttgaatttcttcactttgacattcagagcactgggcagaaatcacattgcgtcaacatcactttctgaccatcgcaatgctatgttttaattagacagtcagattccccttgtccgtaccagttctaagttggttgttaaccgtggaggccgcaagcgcaagcgtagctagcagcaccgcccccgaagaagcagcgccagcacgcatggccagcacaggaagcacatccacccaacccttagagccaatccttatcccgaagttacggatctattttgccgacttcccttatctacattattctatcaactagaggctgttaaccttggagacctgctgcggttatgagtacgacttggcgtgaaaactattccttcctgcggattttcaaggaccgtcgcaagcgcaccggacgtcgcaaacaaaggcgacgctcttccagccataagaccccctctccggataaaccaattccagggtgataagctgttaagaaaaaactcctcccagggctcccgccggcgtctccgcattctgttacgttgccgtgaagaatccacatccaagttccggaattttaaccggattccctttcgatggtggtgcaaagaattgcacacgttgaaacggagcttccccatctcttaggatcgactaacccgcgtccaactgctgttgacgcggaacctttccccacttcagtcttcaaagttctcatttgaatatttgctactaccaccaagatctgcactaggggccgttcgacccaggctcacgcccaaggcttcgtcacaaacccccacgcctgcctactcgccaaggcatcacgccatggcggcaaagtataggtaacacgcttgagcgccatccattttcagggctagttcattcggccggtgagttgttacacactccttagcggattccgacttccatggccaccgtccggctgtctggatgaactaacaccttttgtggtgtctgatgagcgtgcattccggcaccttaactttgcgttcggttcatcccgcatcgccagttctgcttaccaaaaatggcccactaaaagctctgcattcaaacgtccgcgttcaataaagcaacagggacttcttacatatttaaagtttgagaatacgctaaggtcatttcgaccccgagacgtctaatcattcgctttacctcataaaactgatacgagcttctgctatcctgagggaaacttcggcaggaaccagctactagatggttcgattagtctttcgcccctatacccaaattcgacgatcgatttgcacgtcagaaccgctacgagcctccaccagagtttcctctggcttcaccctattcaggcatagttcaccatctttcgggtcccaacagctatgctcttactcaaatccatccgataaacatcaggatcggtcgatcgtgcccgcccccgagagagcggtccgacctacgttcactttcattacgcgtacgggttttacacccaaacactcgcatagacgttagactccttggtccatgtttcaagacgggcggtattgcgccgttgtgccagcatccgagacgaaacgagtccgccgcagccctcggtccccatacgcagcatctacaaaaggctataacactccgaggagccacattccaattgtccttatcctgcaacgaaaaccgatgctggcccaggaaaaacccagagcgccgcccacgagaggcaacgatgcgtaaatcccatgtcgagcccaatacccttccctttcaacaatttcacgtgctgtttcactctcttttcaaagtgcttttcatctttccttcacagtacttgttcgctatcggtctctcgccaatatttagccttagatggaatttaccacccacttagagctgcattcccaaacaactcgactcgtcagaagggcctcacaggtgtcgacatgcacgatacggggctctcaccctcagtggcaccctgttccaagggacttgcacacacgtctaacccgagactccaacctgcaatttacaactcgcacactaggtgagatttcaaatctgagctcttgccgcttcactcgccgctactgaggcaatccctgttggtttcttttcctccgcttattgatatgcttaagttcagcgggtattcctacctgatctgaggtcgagcttagttaaaagttcggcggccaaagcgttccaataatttagttcacttcgtccacgacgttccatttcgaaaaaggcatagcctgttctcaactctgcttgcgcaagaaggaaacgacgctcagacaggcatgccccatggaataccatggggcgcaatgtgcgttcaagaactcgatgattcacgatggctgcaattcacactaggtatcgcatttcgctgcgctcttcatcgatgcgagaaccaagagatccgttgttgaaagttttgttttgttaaaacttagtgactggtattattacaattttaggtgtttggtgcgctcacgcatgtgtataagatataaatcacagtaatgatccttccgcaggttcacctacggaaaccttgttacgacttttacgacctctaaatgaccaagtttgactgaattttcagcgccatgggaaagttgcccctcccgcggcgccaatcttggagcctcactaagccattcaatcggtagtagcgacgggcggtgtgtacaaagggcagggacgtaatcaacgcaagctgatgacttgcgcttactaggaattcctcgttgaagagcaaaaattacaatgctctatccccagcacgacggagtttcacgagattacccgggcctctcgaccaaggatatacttgctggctccgtcagtgtagcgcgcgtgcggcccagaacgtctaagggcatcacagacctgttgttgcctcaaacttccatgggtttgaaacccatagtccctctaagaagagcccacgagcagatgctcgcagccctatttagcaggttaaggtctcgtccgttatcgcaattaagcagacaaatcactccaaggactaaaaacggccatgcaccaccacccgtaagatcaagagaagtctctagcttgtcaatccttattacgtctggacctggtgagtttccccgtgttgagtcaaattaagccgcaggctccactcctggtggtgcccttccgtcaattcctttaagtttcagccttgcaaccatactccccccagaacccaaagactttgatttctcgtaaggtgccgagtgggcaagaagcgccacccgatccctagtcggcatagtttatggttaagactacgacggtatctgatcatcttcgatcccctaactttcgttcttgattaatgaaaacgtccttggcaaatgctttcgcagtagttagtcttcagttaatccaagaatttcacctctgacaactgaatactgatgcccccgaccgtccctattaatcattacgatggtcctagaaaccaacaaaatagaaccataacgtcctattctattattccatgctaatatatccgagcaaaggcctgctttgaacactctaatttcctcaaagtaatcgtcctggttcactccgaagagttagccagaaggaaaagacccggccgcaacagtacttaccataggtagaccgcccgcccaggcccaaagttcaactacgagctttttaactgcaacaactttaatatacgctattggagctggaattaccgcggctgctggcaccagacttgccctccaattgttcctcgttaaggtatttacattgtactcattccaattacaagaccaatggccctgtatcgttatatattgtcactacctccctgtgtcaggattgggtaatttgcgcgcctgctgccttccttggatgtggtagccgtttctcaggctccctctccggaatcgaacccttattccccgttacccgtgaaaaccatggtaggcctctatcctaccatcgaaagttgatagggcagaaatttgaatgaaccagctccagcacaaaggccatgagcttcgaaaagttattatgaatcatcaaaaggcccgagggcattgattttttatctaataaatacacccctcccgaagtcggggctttacgcatgtattagctctagattttccacggttatccatgtagaacggaactatcaaataaacgataactgatttaatgagccattcgcagtttcaccgtataatgcttatacttagacatgcatggcttaatctttgagacaagcatatgactactggcaggatcaaccagataactacgctcagatgagttttgttatgatgattggattaacctacacatagcactgtttgactttcttcaacggaggtcccctgtacaaagtacagcttcgtccgcttcagtggagagtggtcccagatgtcacgtttgcacggctacatctccaaccccgtcccaataaacctagtggtccgctggctatcagctaaacccaccggccccgtcagtgcgcaccacggtcgcaagaccacaatgcccctgtccaagacttgcgtctcttgtccccggccatacccaagcttgtccgtagacgcccctgcatactctccgtgggatcttggcctatcggtgcacaacaccgctaagaaccgcattttttaagtgcttttctcatgtatatcccccggactgcgtaatcttgccaaaaaattcgcagcgcgcgttggccgcggcgtcaggagttaaattggacttcgttttggcgtgcaatgttttcgagcgcgaggtgaagtttttctttttgtcaatgctgctgagccgtcagccgtgcatgcatttctaacaaatcccattttgcaaacttgcccaatatgccttcctacaccttcataattacatggcacaactatacagagcatcctgatcaacatatctttgtaactaagcaataggacagaaactaggaaattttgatgtgtgttttccttcactgggcactgcccatggaatgtaatacttgcccgacaaaaactttcaatcttcccagcgaatctcaaaatttaaaaaaattcaaaactctcacagtctacttcccacgaaattcccacttcactgggcaacaataccaacaccccccgtaactcccctctcaggccggattttcaattccaatctctgttctctactctccctggcctcttgtacctcctaccactctcagaatcctgacttagtgattttgaaatttctcatattgggtttctacccggcagctgcccatgaaaaaatgtctactgggcaactccccagtgaacaccctcgctgtgcatttttctcactttgccaaaatttccagccaagtactcacacaatttgtctgcttgcccacgaagggcctcttcactgggcacagctccactgggcactcccagtcaacttgcccatgaaaccacttctctccagatgaactttggttttggccaatttccattatgcccatgttaaacactgctcctagagagtaaaacacgctgatcaaaactatctacaaggcatgtctctagctggcgtggttgtcgagatattcactgttgaacttggcactctactaacttcacctatttatttctccacaaccagtgcgtctttcgctttgataattttatttcataataaacaccactggatctccacatcaagcatataatatcatcaaaaagaacatactttgttttttattacaccctccctgttgtacccatatcacactttacccttctaactcctccaatacgctaaaatatgcccatgttaaatctttaccactatattctacgctctctgttgcccatccaactctaaaaagtcaaaaaaaacaacataaaaaatacttcttccaactagtacatccatcaacacacatattcccaatgaaattcttcacttacctcccatgaaaaataaaaaatcatattttcaccccttcttttgcctccataaaatttacacagatactcctgaacaatccgattccaacgcactgggtctcgtgtcctcagcacgtctgtagcccgagaaaaaaggcctttttcattttgacatccataataccgcccgaaatcgaacactgtcggttgcggccatatctagcagaaagcaccgtttcccgtccgatcaactgtagttaagctgctaagagcctgaccgagtagtgtagtgggagaccatatgcgaaactcaggtgctgcaatctttttttttcatagtatttttcatagtagtgtattttcctgtggcgtattgcgtattattttttgcggcgcatttctctcgtggaggctcgtcacttttttacggaggctcatctttttcagaatttctcgccaattttccgaacccaattttgcggaggctcgtcacttttttacggaggctcatctttttcagaatttctcgccaaatttccgaacccaaaattccggaggctcgtcactttcaaaaatttctcaaatttccgaacccaattttgcggaggctcgtcacttttcaccacgcgcgccaattttccgaacccaattttccgctgcgccacaggcaccgcatgcgccactactgcctgcaccgccacccgccaccgccacatttttccacttttcgtcgagtcgaaaaaattgttttttctcacgagcccctcgactttttcttatcgtacgctgctgagccgctatcagtgtgctgagccgccacgccaagccgccacgacaccactttcgttgtcttttggttatgtccgttatcaccttctgtttactatcttcttactcccgcagtcattctacacactacatatacctacatgcgcacaaaaattcaggcttcacacccataccctacactagtgcatacctgctctggttgtccagatataagcgttcaaagttagtcaaaaatcccatattttgacctctaggtgtaaaataaattactttcttaataatttccaaaaagtgcgttttttactttttagctcttttttcgggtcgttgcgtctctacatactaattttcgtgctacagccgtgcagtgaaaatttttcaccaccatatttccctaatttctgtgcgtcacttgcctctttgggacgttcccagcccttttttccccaaacccctctgtccgcacgtgattctttctccagagtcaactccctctgactcttcttctctttggttctttaatatgactctgtgtcttgacttctacttattcacgtgattgaatcactggagtcatctcacgtgttattgcgctcaccacttcataactaattcagtaatcaagtcttaattaactaagcacaagtctacaggtctatactaatctccactgtacatcttaagtaatcactacactacgtaatcataagtcttaatctccgcgggccactgtacgtcttatgtaatcactacactacgtaatcataagtcttaatctcctctgacatcatagctattctccttatgtaatcaataatccctaccctaccactctcctcccttacgtaagcataaatcccgtctgacattatttgaaaaaatcctaagtccaaaacaggtaaaatatgcctacccagacgatcgacccaaatccaccacccccgtcctcacgtataccatacaccaagccacggactaggaattaatggcacccaacagcatcgcccaccacccggccacgccggcatccccaaatctcgccgaaatacccagctcgcatctgcaaactgcaacttcgccgccgaagcaacaaatcggacaacagaggcttaatctcagcagatcgtaacaacaaggctactctactgcttacaataccccgttgtacatctaagtcgtatgcaaaggatttatcctcgcgcatcctgacattgccatccgccggcaagcacacgcagcctttccgccacgcgcaccgctgccgacctactacggttctgcgacacaagtgccttattcttatccttctcaaatgtgcgagggcaagtaatcgtcgcgttctagcatggattctgacttagaggcgttcagccattatccagcagatggtagcttcgcggcagtgtctgctcagacagccgcaaaaaccaattatctgaatgaacggttcctctcgtactaagttcaattactattgcgacaacattcatcagtagggtaaaaactaacctgtctcacgacggtctaaacccagctcacgttccctattagtgggtgaacaatccaacgcttaccgaattctgcttcggtatgataggaagagccgacatcgaagaatcaaaaagcaatgtcgctatgagcgcttgactgccacaagccagttatccctgtggtaacttttctggcacctctagcctcaaattccgagggactaaaggatcgataggccacactttcatggtttgtattcacactgaaaatcaaaatcaaggggacttttacccttttgttctactggagatttctgttctccatgagtcccccttaggacatctgcgttatcgtttaacagatgtgccgccccagccaaactccccacctgacaatgtcatcaacccggatcggcacacaagatgccttcgcactagaacgtggtcgtcaagaccagctccgcttcattgaataagtaaaaaaacgataaaggtagtggtatttcactggcgccggagctcccacttatgctacaccctctatgtcttttcacaatgtcaaactagagtcaagctcaacagggtcttctttccccgctgattctgccaagcccgttcccttggctgtggtttcgctagatagtagatagggacagtgggaatctcgttaatccattcatgcgcgtcactaattagatgacgaggcatttggctaccttaagagagtcatagttactcccgccgtttacccgcgcttggttgaatttcttcactttgacattcagagcactgggcagaaatcacattgcgtcaacatcactttctgaccatcgcaatgctatgttttaattagacagtcagattccccttgtccgtaccagttctaagttggttgttaaccgtggaggccgcaagcgcaagcgtagctagcagcaccgcccccgaagaagcagcgccagcacgcatggccagcacaggaagcacatccacccaacccttagagccaatccttatcccgaagttacggatctattttgccgacttcccttatctacattattctatcaactagaggctgttaaccttggagacctgctgcggttatgagtacgacttggcgtgaaaactattccttcctgcggattttcaaggaccgtcgcaagcgcaccggacgtcgcaaacaaaggcgacgctcttccagccataagaccccctctccggataaaccaattccagggtgataagctgttaagaagaaaagaaaactcctcccagggctcccgccggcgtctccgcattctgttacgttgccgtgaagaatccacatccaagttccggaattttaaccggattccctttcgatggtggtgcaaagaattgcacacgttgaaacggagcttccccatctcttaggatcgactaacccgcgtccaactgctgttgacgcggaacctttccccacttcagtcttcaaagttctcatttgaatatttgctactaccaccaagatctgcactaggggccgttcgacccaggctcacgcccaaggcttcgtcacaaacccccacgcctgcctactcgccaaggcatcacgccatggcggcaaagtataggtaacacgcttgagcgccatccattttcagggctagttcattcggccggtgagttgttacacactccttagcggattccgacttccatggccaccgtccggctgtctggatgaactaacaccttttgtggtgtctgatgagcgtgcattccggcaccttaactttgcgttcggttcatcccgcatcgccagttctgcttaccaaaaatggcccactaaaagctctgcattcaaacgtccgcgttcaataaagcaacagggacttcttacatatttaaagtttgagaatacgctaaggtcatttcgaccccgagacgtctaatcattcgctttacctcataaaactgatacgagcttctgctatcctgagggaaacttcggcaggaaccagctactagatggttcgattagtctttcgcccctatacccaaattcgacgatcgatttgcacgtcagaaccgctacgagcctccaccagagtttcctctggcttcaccctattcaggcatagttcaccatctttcgggtcccaacagctatgctcttactcaaatccatccgataaacatcaggatcggtcgatcgtgcccgcccccgagagagcggtccgacctacgttcactttcattacgcgtacgggttttacacccaaacactcgcatagacgttagactccttggtccatgtttcaagacgggcggtattgcgccgttgtgccagcatccgagacgaaacgagtccgccgcagccctcggtccccatacgcagcatctacaaaaggctataacactccgaggagccacattccaattgtccttatcctgcaacgaaaaccgatgctggcccaggaaaaacccagagcgccgcccacgagaggcaacgatgcgtaaatcccatgtcgagcccaatacccttccctttcaacaatttcacgtgctgtttcactctcttttcaaagtgcttttcatctttccttcacagtacttgttcgctatcggtctctcgccaatatttagccttagatggaatttaccacccacttagagctgcattcccaaacaactcgactcgtcagaagggcctcacaggtgtcgacatgcacgatacggggctctcaccctcagtggcaccctgttccaagggacttgcacacacgtctaacccgagactccaacctgcaatttacaactcgcacactaggtgagatttcaaatctgagctcttgccgcttcactcgccgctactgaggcaatccctgttggtttcttttcctccgcttattgatatgcttaagttcagcgggtattcctacctgatctgaggtcgagcttagttaaaagttcggcggccaaagcgttccaataatttagttcacttcgtccacgacgttccatttcgaaaaaggcatagcctgttctcaactctgcttgcgcaagaaggaaacgacgctcagacaggcatgccccatggaataccatggggcgcaatgtgcgttcaagaactcgatgattcacgatggctgcaattcacactaggtatcgcatttcgctgcgctcttcatcgatgcgagaaccaagagatccgttgttgaaagttttgttttgttaaaacttagtgactggtattattacaattttaggtgtttggtgcgctcacgcatgtgtataagatataaatcacagtaatgatccttccgcaggttcacctacggaaaccttgttacgacttttacgacctctaaatgaccaagtttgactgaattttcagcgccatgggaaagttgcccctcccgcggcgccaatcttggagcctcactaagccattcaatcggtagtagcgacgggcggtgtgtacaaagggcagggacgtaatcaacgcaagctgatgacttgcgcttactaggaattcctcgttgaagagcaaaaattacaatgctctatccccagcacgacggagtttcacgagattacccgggcctctcgaccaaggatatacttgctggctccgtcagtgtagcgcgcgtgcggcccagaacgtctaagggcatcacagacctgttgttgcctcaaacttccatgggtttgaaacccatagtccctctaagaagagcccacgagcagatgctcgcagccctatttagcaggttaaggtctcgtccgttatcgcaattaagcagacaaatcactccaaggactaaaaacggccatgcaccaccacccgtaagatcaagagaagtctctagcttgtcaatccttattacgtctggacctggtgagtttccccgtgttgagtcaaattaagccgcaggctccactcctggtggtgcccttccgtcaattcctttaagtttcagccttgcaaccatactccccccagaacccaaagactttgatttctcgtaaggtgccgagtgggcaagaagcgccacccgatccctagtcggcatagtttatggttaagactacgacggtatctgatcatcttcgatcccctaactttcgttcttgattaatgaaaacgtccttggcaaatgctttcgcagtagttagtcttcagttaatccaagaatttcacctctgacaactgaatactgatgcccccgaccgtccctattaatcattacgatggtcctagaaaccaacaaaatagaaccataacgtcctattctattattccatgctaatatatccgagcaaaggcctgctttgaacactctaatttcctcaaagtaatcgtcctggttcactccgaagagttagccagaaggaaaagacccggccgcaacagtacttaccataggtagaccgcccgcccaggcccaaagttcaactacgagctttttaactgcaacaactttaatatacgctattggagctggaattaccgcggctgctggcaccagacttgccctccaattgttcctcgttaaggtatttacattgtactcattccaattacaagaccaatggccctgtatcgttatatattgtcactacctccctgtgtcaggattgggtaatttgcgcgcctgctgccttccttggatgtggtagccgtttctcaggctccctctccggaatcgaacccttattccccgttacccgtgaaaaccatggtaggcctctatcctaccatcgaaagttgatagggcagaaatttgaatgaaccagctccagcacaaaggccatgagcttcgaaaagttattatgaatcatcaaaaggcccgagggcattgattttttatctaataaatacacccctcccgaagtcggggctttacgcatgtattagctctagattttccacggttatccatgtagaacggaactatcaaataaacgataactgatttaatgagccattcgcagtttcaccgtataatgcttatacttagacatgcatggcttaatctttgagacaagcatatgactactggcaggatcaaccagataactacgctcagatgagttttgttatgatgattggattaacctacactagcactgtttgactttcttcaacggaggtcccctgtacaaagtacagcttcgtccgcttcagtggagagtggtcccagatgtcacgtttgcacggctacatctccaaccccgtccccaataaacctagtggtccgctggctatcagctagcaacccaccggccccgtcagtgcgcaccacggtcgcaagaccacaatgcccctgtccaagacttgcgtctcttgtccccggccatacccaagcttgtccgtagacgcccctgcatactctccgtgggatcttggcctatcggtgcacaacaccgctaagaaccgcattttttaagtgcttttctcatgtatatcccccggactgcgtaatcttgccaaaaattcgcagcgcgcgttggccgcggcgtccaggagttaaattggacttcgttttggcgtgcaatgttttcgagcgcgaggtgaagtttttctttttgtcaatgctgctgagccgtcagccgtgcatgcatttctaacaaatcccattttgcaaacttgcccaatatgccttcctacaccttcataattacatggcacactatacagagcatcctgatcaacatatctttgtaactaagcaataggacagaaactaggaaattttgatgtgtgttttccttcactgggcactgcccatggaatgtaatacttgcccgacaaaaactttcaatcttcccagcgaatctcaaaatttaaaaaaaattcaaaactctcacagtctacttcccacgaaattcccacttcactgggcaacaataccaacaccccccgtaactcccctctcaggccggattttccaattccaatctctgttctctactctccctggcctcttgtacctcctaccactctcagaatcctgacttagtgattttgaaatttctcatattgggtttctacccggcagctgcccatgaaaaaatgtctactgggcaactccccagtgaacaccctcgctgtgcatttttctcactttgccaaaatttccagccaagtactcacacaatttgtctgcttgcccacgaagggcctcttcactgggcacagctccactgggcactcccagtcaacttgcccatgaaaccacttctctccagatgaactttggttttggccaatttccattatgcccatgttaaacactgctcctagagagtaaaacacgctgatcaaaactatctacaaggcatgtctctagctggcgtagttgtagagataattccactgttgtcgaacttggcacttctactaacttcaccctatttatttctcccaaaaaccagtgcgtctttgccctttgataattttatttcataaataaaccaccacggatctccacatcaaggcatccaagaatatcatcaaaatagaacaatactttgttttttattacaccctccctgtttctacccatatccacactgtacccttctaactcctgccaatacgcctaaaatatgccctatgtttaaatcttaccactatattctacgctctctgcttgcccatccaactctaaaaagtcaaaaaaaaacaacataaaaaatacttctttaccaactagtacatccatcaacacacataattctccaatgcaaattcttcacttacctcccatgaaaaataaaaatcatattttcaccccttcttttgctccataaaaattatacacagatactcctgaacaatccgattccacgcactgggtctcgtgtcctcagcacgtctgtagcccgagaaaaaggcctttttcattttagacatccataatacctcccgaaatcgaacactgtctgttgcggccatatctagcagaaagcaccgtttcccgtccgatcaactgtagttaagctgctaagagcctgaccgagtagtgtagtgggagaccatatgcgaaactcaggtgcctgcaatctttttttttcatagtatttattacatagtagtgtattttttcctgtggcgtattgcgtattatttttatgcggcgcatttctctcgtggaggctcgtcacttttttacggaggctcatcttttcagaatttctcgccaattttccgaaaccccaattttgcggaggctcgtcactttttacggaggctcatctttttcagaatttctcgccaaattttccgaaacccaaaattccggaggctcgtcactttcaaaaatttctcaatttccgacacccaattttgcggaggcctcgtcacttttcaccacgcgcgccaattttccgaacccaattttccgctgcgccacaggcaccgcatgcgccactactgcctgcaccgccacccgccaccgccacatttttccacttttcgtcgagtcgaaaaaattgttttttctcacgagcccctcgacttttttcttatcgtacgctgctgagccgctatcagtgtgctgagccgccacgccaagccgccacgacaccactttcgttgtcttttggttatgtccgttatcaccttctgtttactatcttcttactcccgcagtcattctacacactacatatacctacatgcgcacaaaaattcaggcttcacacccataccctacactagtgcatacctgctctggttgtccagatataagcgttcaaagttagtcaaaaatcccatattttgacctctaggtgtaaaataaattactttcttaataatttccaaaaagtgcgttttttactttttagctcttttttcgggtcgttgcgtctctacatactaattttcgtgctacagccgtgcagtgaaaatttttcaccaccatatttccctaatttctgtgcgtcacttgcctctttgggacgttcccagcccttttttccccaaacccctctgtccgcacgtgattctttctccagagtcaactccctctgactcttcttctctttggttctttaatatgactctgtgtcttgacttctacttattcacgtgattgaatcactggagtcatctcacgtgttattgcgctcaccacttcataactaattcagtaatcaagtcttaattaactaagcacaagtctacaggtctatactaatctccactgtacatcttaagtaatcactacactacgtaatcataagtcttaatctccgcgggccactgtacgtcttatgtaatcactacactacgtaatcataagtcttaatctcctctgacatcatagctattctccttatgtaatcaataatccctaccctaccactctcctcccttacgtaagcataaatcccgtctgacattatttgaaaaaatcctaagtccaaaacaggtaaaatatgcctacccagacgatcgacccaaatccaccacccccgtcctcacgtataccatacaccaagccacggactaggaattaatggcacccaacagcatcgcccaccacccggccacgccggcatccccaaatctcgccgaaatacccagctcgcatctgcaaactgcaacttcgccgccgaagcaacaaatcggacaacagaggcttaatctcagcagatcgtaacaacaaggctactctactgcttacaataccccgttgtacatctaagtcgtatgcaaaggatttatcctcgcgcatcctgacattgccatccgccggcaagcacacgcagcctttccgccacgcgcaccgctgccgacctactacggttctgcgacacaagtgccttattcttatccttctcaaatgtgcgagggcaagtaatcgtcgcgttctagcatggattctgacttagaggcgttcagccattatccagcagatggtagcttcgcggcagtgtctgctcagacagccgcaaaaaccaattatctgaatgaacggttcctctcgtactaagttcaattactattgcgacaacattcatcagtagggtaaaactaacctgtctcacgacggtctaaacccagctcacgttccctattagtgggtgaacaatccaacgcttaccgaattctgcttcggtatgataggaagagccgacatcgaagaatcaaaaagcaatgtcgctatgagcgcttgactgccacaagccagttatccctgtggtaacttttctggcacctctagcctcaaattccgagggactaaaggatcgataggccacactttcatggtttgtattcacactgaaaatcaaaatcaaggggacttttacccttttgttctactggagatttctgttctccatgagtcccccttaggacatctgcgttatcgtttaacagatgtgccgccccagccaaactccccacctgacaatgtcatcaacccggatcggcacacaagatgccttcgccactagaacgtggtcgtcaagaccagcttccgcttcattgaatatagtaaaaaaacgataaaggtagtggtatttcactggcgccggagctcccacttatgctacaccctctatgtcgtttcacatgtcaaactagagtcaagctcaacaggtcttctttccccgctgattctgccaagcccgttccctggctgtggtttcgctagatagtagatagggacagtgggaatctcgttaatccattcatgcgcggtcactaattagatgacgaggcatttggctaccttaagagagtcatagttactccccgccgtttacccggcgcttggtttgaatttcttcacttgacattcagagcactgggcagaaatcacatatgcgtccaacaatcactttctgaccatcgcaatgctatgttttaaattagacagtcagattccccttgtccgtaccagttctaagttggttgttaaccgtggaggccgcaagcgcaagcgtagctagcagcaccgcccccgaagaagcagcgccagcacgcatggccagcacaggaagcacatccacccaacccttagagccaatccttatcccgaagttacggatctattttgccgacttcccttatctacattattctatcaactagaggctgttaaccttggagacctgctgcggttatgagtacgacttggcgtgaaaactattccttcctgcggattttcaaggaccgtcgcaagcgcaccggacgtcgcaaacaaaggcgacgctcttccagccataagaccccctctccggataaaccaattccagggtgataagctgttaagaagaaaagaaaactcctcccagggctcccgccggcgtctccgcattctgttacgttgccgtgaagaatccacatccaagttccggaattttaaccggattccctttcgatggtggtgcaaagaattgcacacgttgaaacggagcttccccatctcttaggatcgactaacccgcgtcccaactgctgttgacgcggaacctttccccacttcagtcttcaagttctcatttgaatatttgctaataccaccaagatctgcactaggggccgttcgacccagctcacgcccaaggcttcgtcacaaacccccacgcctgcccctactcgccaaggcatcacgcccatggcggcaaatataggtaacaccgccttgagcgcccatctccattttcagggctagttcattcggccggtgagttgttaccacactccttagcggattccgacttccatggccacgtccggctgtctggattgaaactaacaccattattgtgtgtctgatgagcgtgccattccggcacctaatctttgcgttcgggttcatcccgcatcgccagttctgctcttaaccaaaaatggcccaactaaaaagctctgcattcaaacgtccgcgttcactaaagcaacagggacttcttacatatttaaagtttgagaatacgctaagtcatttcgacccccgagacgtctaatcatgtcgcttacctcataaaactgatacgagcttctgctatcctgagggaaacttcggcaggaaccagctactagatggttcgatgtagtctttcgcccctatacccaaattcgacgatcgatttgcacgtcagaaccgctacgagcctccaccagagtttcctctggcttcaccctattcaggcatagttcaccatctttcgggtcccaacagctatgctcttactcaaatccatccgataaaacaatcaggatcggttcgatcgtgcccgcccccgagagagcggggttccgcaacctacgttcactttcattacgcgtacggtgttttacacccaaacactcgcatagacgttaaagtactccttgggtctccatgtttcaagacgggcggtattgccgccgttgtgcctagcatccgagacgaaacgagtccgccgcgccctcggtccccatacgcagcatctacaaaaggctataacactccgaggagccacattccaattgtccttatcctgcaacgaaaaccgatgctggcccaggaaaaacccagagcgccgcccacgagaggcaacgatgcgtaaatcccatgtcgagcccaatacccttccctttcaacaatttcacgtgctgtttcactctcttttcaaagtgcttttcatctttccttcacagtacttgttcgctatcggtctctcgccaatatttagccttagatggaatttaccacccacttagagctgcattcccaaacaactcgactcgtcagaagggcctcacaggtgtcgacatgcacgatacggggctctcaccctcagtggcaccctgttccaagggacttgcacacacgtctaacccgagactccaacctgcaatttacaactcgcacactaggtgagatttcaaatctgagctcttgccgcttcactcgccgctactgaggcaatccctgttggtttcttttcctccgcttattgatatgcttaagttcagcgggtattcctacctgatctgaggtcgagcttagttaaaagttcggcggccaaagcgttccaataatttagttcacttcgtccacgacgttccatttcgaaaaaggcatagcctgttctcaactctgcttgcgcaagaaggaaacgacgctcagacaggcatgccccatggaataccatggggcgcaatgtgcgttcaagaactcgatgattcacgatggctgcaattcacactaggtatcgcatttcgctgcgctcttcatcgatgcgagaaccaagagatccgttgttgaaagttttgttttgttaaaacttagtgactggtattattacaattttaggtgtttggtgcgctcacgcatgtgtataagatataaatcacagtaatgatccttccgcaggttcacctacggaaaccttgttacgacttttacgacctctaaatgaccaagtttgactgaattttcagcgccatgggaaagttgcccctcccgcggcgccaatcttggagcctcactaagccattcaatcggtagtagcgacgggcggtgtgtacaaagggcagggacgtaatcaacgcaagctgatgacttgcgcttactaggaattcctcgttgaagagcaaaaattacaatgctctatccccagcacgacggagtttcacgagattacccgggcctctcgaccaaggatatacttgctggctccgtcagtgtagcgcgcgtgcggcccagaacgtctaagggcatcacagacctgttgttgcctcaaacttccatgggtttgaaacccatagtccctctaagaagagcccacgagcagatgctcgcagccctatttagcaggttaaggtctcgtccgttatcgcaattaagcagacaaatcactccaaggactaaaaacggccatgcaccaccacccgtaagatcaagagaagtctctagcttgtcaatccttattacgtctggactctggtgagtttccccgtgttgagtcaaattaagccgcaggctccactcctggtggtgcccttccgtcaattcctttaagtttcagccttgcaaccatactcccccccagaacccaaagactttgatttctcgctaaggtgccgagtgggcaagaagcgcacccgatccctagtcggcatagtttatggttaagacctacgacggtatctgatcatcttcgatccctaactttcgttcttgattaatgaaaacgtccttggcaaatgcctttcgcagtagttagtcttcagttaatccaagaatttcactctgacaactgaatactgatgcccccgaccgtccctattaatcattacgatggtcctagaaaccaacaaaatagaaccctaacgtcctattctattattccatgctaatatatccgagcaaaggcctgcttttgaacactctaatttcctcaaagtaatcgtcctggtatcactccgaagagttagccagaaggaaaagacccggccgcaacagtacttaccataggtagaccgcccgcccaggcccaaagttcaactacgagctttttaactgccaacaactttaatatacgctattggagctggaattaccgcggctgctggcaccagactttgccctccaattgttcctcgttaaggtatttacattgtactcattccaattacaagaccaatggccctgtatcgtttatatattgtcactaccttccctgtgtcaggattgggtaatttgcgcgcctgctgccttccttggatgtggtagccgtttctcaggctccctctccggaatcgaacccttattccccgttacccgtgaaaaccatggtagtgcctctatcctaccatcgaaagttgatagggcagaaatttgaatgaaccagctccagcacaaaaaggccatgagcttcgaaaagttattatgaatcatcaaaaggcccgagggcattgattttttatctaattaaatacacccctcccgaagtcggggctttacgcatgtattagctctagattttccacggttatccatgtagaacggaactatcaaataaacgatactgatttaaatgagccattcgcagtttcaccgtataatgcttatacttagacatgcatgcttaatctttgagacaagcatatgactactggcaggatcaaccagataacttacgctcagatgagttttgttatgatgattggattaacctacacatagcactgtttgactttcttcaacggaggtcccctgtacaaagtacagcttcgtcccgcttcagtggagagtggtcccagatgtcacgtttgcacggctacatctccaaccccgtccccaataaacctagtggtccgctggctatcagctagcaacccaccggccccgtcagtgcgcaccacggtcgcaagaccacaatgcccctgtccaagacttgcgtctcttgtccccggccatacccaagcttgtccgtagacgcccctgcatactctccgtgggatcttggcctatcggtgcacaacaccgctacgaaccgcatgttttaagtgcttttctcatgtatatccccggactgcgtaatcttgccaaaaattcgcagcgcagcgttggccgcggcgtccaggagttaaattggacttcgtttgggcgtgcaatgttttcgagcgcgagtgaagtttttctttttgtcaatgctgctgagccgtcagccgtgcatagcatttctaacaaatcccattttgcaaacttgcccaatatgccttcctacaccttcataattacatggcacactatacagagcatcctgatcaacatatctttgtaactaagcaataggacagaaactaggaaattttgatgtgtgttttccttcactgggcactgcccatggaatgtaatacttgcccgacaaaaactttcaatcttcccagcgaatctcaaaattttaaaaaaaattcaaaactctcacagtctacttcccacgaaattcccacttcactgggcaacaataccaacaccccccgtaactcccctctcaggccggattttccaattccaatctctgttctctactctccctggctcttgtacctcctaccactctcagaatcctgacttagtgattttgaaatttctcatattgggtttctacccggcagctgcccatgaaaaaaatgtctactgggcaactccccagtgaacaccctcgcttgtgcattttctcactttgccaaaatttccagccaagtactcacacaatttgtctgcttgccccacgaagggcctcttcactgggcacagctccactgggcactccagtcaacttgcccatgaaaccactgctctccagatgaactttggttttggccaatttccattatgcccatgttaaacactgctcctagagagtaaaacacgctgatcaaaactatctacaaggcatgtctctagctggcgtggttgtcgagatattcactgttgaacttggcactctactaacttcacctatttatttctccacaaccagtgcgtctttcgctttgataattttattcataataaacaccactggatctccacatcaagcatataatatcatcaaaaagaacatactttgttttttattacaccctccctgttgtacccatatcacactttacccttctaactcctccaatacgctaaaatatgcccatgttaatctttaccactatattctacgctctctgttgcccatccaactctaaaaagtcaaaaaaaacaacataaaaaaatacttcttccaactagtacatccatcaacccacataattcccaatgaaattcttcactctacctcccatgaaaaataaaaaatcatatttcaccccttcttttgcctccataaaatttacacagatactcctgaacaatccgattccaacgcactgggtctcgtgtcctcagcacgtctgtagcccgagaaaaaaggcctttttcattttgacatccataataccgcccgaaatcgaacactgtcggttgcggccatatctagcagaaaagccaccgtttcccgtccgatcaactgtagttaagctgctaagagcctgaccgaagtagtgtagtgggagaccatatgcgaaaactcaggtgctgcaatctttttttttcatagtatttttcatagtagtgtattttcctgtggcgtattgcgtattattttttgcggcgcatttctctcgtggaggctcgtcacttttttacggaggctcatctttttcagaatttctcgccaattttccgaacccaattttgcggaggctcgtcactttttacggaggctcatctttttcagaatttctcgccaaatttccgaacccaaaattccggagggctcgtcactttcaaaaatttctcaaatttccgaacccaattttgcggaggcctcgtcacttttcaccacgcgccgccaattttccgaaacccaattttccgctgcgccacagagcaccgcatgcgccactactgccctgcaccgcccccgccaccgccacatttttccacttttcgtcgagtcgaaaaattgttttttcttcacgaagcccctcgactttttttcttatcgtacgctgctgagccgctatcagtgtgctgagccgccacgccaagccgccacgacaccacttcgtttgtctttggttatgtccgttatcaccttctgtttactatcttcttactccgcagtcattctaacacactaatatacctacatgcgcacaaaaattcaggctttcacacccataccctacactagtgcatacctgctctggttgtccagatataagcgttcaaagtagtcaaaaacccatattttgacctctaggtgtaaaataaattacttctaataatttccaaaaagtgcgttttttactttttagctcttttttcgggtcgttgcgtctctacatactaattttcgtgctacagccgtgcagtgaaaatttttcaccaccatatttccctaatttctgtgcgtcacttgcctctttgggacgttcccagcccttttttccccaaacccctctgtccgcacgtgattctttctccagagtcaactccctctgactcttcttctctttggttctttaatatgactctgtgtcttgacttctacttattcacgtgattgaatcactggagtcatctcacgtgttattgcgctcaccacttcataactaattcagtaatcaagtcttaattaactaagcacaagtctacaggtctatactaatctccactgtacatcttaagtaatcactacactacgtaatcataagtcttaatctccgcgggccactgtacgtcttatgtaatcactacactacgtaatcataagtcttaatctcctctgacatcatagctattctccttatgtaatcaataatccctaccctaccactctcctcccttacgtaagcataaatcccgtctgacattatttgaaaaaatcctaagtccaaaacaggtaaaatatgcctacccagacgatcgacccaaatccaccacccccgtcctcacgtataccatacaccaagccacggactaggaattaatggcacccaacagcatcgcccaccacccggccacgccggcatccccaaatctcgccgaaatacccagctcgcatctgcaaactgcaacttcgccgccgaagcaacaaatcggacaacagaggcttaatctcagcagatcgtaacaacaaggctactctactgcttacaataccccgttgtacatctaagtcgtatgcaaaggatttatcctcgcgcatcctgacattgccatccgccggcaagcacacgcagcctttccgccacgcgcaccgctgccgacctactacggttctgcgacacaagtgccttattcttatccttctcaaatgtgcgagggcaagtaatcgtcgcgttctagcatggattctgacttagaggcgttcagccattatccagcagatggtagcttcgcggcagtgtctgctcagacagccgcaaaaaaccaattatctgaatgaacggttcctctcgtactaagttcaattacctattgccgacaacattcatcagtagggtaaactaacctgtctcacgacggttctaaacccagctcacgttccctattagtggcgtgaacaatccaacgcttaccgaattctgcttcggttatgatagggaagagccgaatcgaagaatcaaaaagcaatgtcgctatgagcgcttgactgccacaagccagttatccctgtggtaacttttctggcacctctagcctcaaattccgagggactaaaggatcgataggccacactttcatggtttgtattcacactgaaaatcaaaatcaaggggacttttacccttttgttctactggagatttctgtcttctacatgagtcccccttaggacatctgcgttatcgtttaacagatgtgccgccccagccaaacctccccacctgacaatgtcatcaacccggatcggcacacaagatgccttcgcactagaaacgtggtcgtcaagaccagctccgcttcattgaataagtaaaaaaacgataaaaggtagtggtatttcactggcgccggagctcccacttatgctacaccctctatgtcttttcacaatgtcaaactagagtcaagctcaacagggtcttctttccccgctgattctgccaagccccgttcccttggctgtgtttcgctagatagtagatagggacagtgggaatctcgtaatccattcatgcgcgtccactaattagatgacgaggcattttggctaccttaagagagtcatagttactcccgccgtttacccgcgcttggttgaatttctcacttttgacattcagagcactgggcagaaatcacatgccgtcaaacatcactttctgaccatcgcaatgctatgttttaattagacagtcagattccccctgtccgtaccagttctaagttggttgttaaccgtggaggcccgcaagcgcaagcgtagctagcagcaccgccccgaagaagcagcgccagcacgcatggccagcacaggaagcacatccacccacccttagagccaatccttatcccgaagttacggatctattttgccgacttcccttatctacattattctatcaactagaggctgttaaccttggagacctgctgcggttatgagtacgacttggcgtgaaaactattccttcctgcggattttcaaggaccgtcgcaaggccaccggacgtcgcaaacaaaggcgacgctcttcagccataagaccccctctccggataaaccaattccagggtgataagctgttaagaagaaaagaaaacctcctcccaggctcccgccggcgtctccgcattctgtttacgttgccgtgaagaatccacatccaagttccggaattttaacggattcccttcgatggtggtgcaaagaattgcacacgttgaaacggagcttccccatctcttaggatcgactaacccgcgtccaactgctgttgacgcggaacctttccccacttcagtcttcaaagttctcatttgaatatttgctactaccaccaagatctgcactaggggccgttcgacccaggctcacgcccaaggcttcgtcacaaacccccacgcctgcctactcgccaaggcatcacgccatggcggcaaagtataggtaacacgcttgagcgccatccattttcagggctagttcattcggccggtgagttgttacacactccttagcggattccgacttccatggccaccgtccggctgtctggatgaactaacaccttttgtggtgtctgatgagcgtgcattccggcaccttaactttgcgttcggttcatcccgcatcgccagttctgcttaccaaaaatggcccactaaaagctctgcattcaaacgtccgcgttcaataaagcaacagggacttcttacatatttaaagtttgagaatacgcctaaggtcatttcgaccccgagacgtctaatcattcgctttacctcataaaactgatacgagcttctgctatctccggaggaaacttcggcaggaaccagctaactagatggttcgattagtctttcgccctatacccaaattcgacgatcgatttgcacgtcatgaaccgctacgagccccaccagagttttcctctggcttcaccctattcaggcctagttcacatctttcggtcccaacagctaatgctcttactcaaatccatccgataaacatcaggatcggtcgatcgtgcccgcccccgagagagcggtccgactacgttcactttcattacgcgtacgggttttacaccaaacactcgcagagacgttagactcctttgttccatgtttcaagacgggtcggtattgcgccgtctgtgccagcatccgagaccgaaacgagtccgccgcagccctctcgtccccatacgcagcatctacaaaaggctataacactccgaggagccacattccaattgtccttatcctgcaacgaaaaccgatgctggcccaggaaaaacccagagcgccgcccacgagaggcaacgatgcgtaaatcccatgtcgagcccaatacccttccctttcaacaatttcacgtgctgtttcactctcttttcaaagtgcttttcatctttccttcacagtacttgttcgctatcggtctctcgccaatatttagccttagatggaatttaccacccacttagagctgcattcccaaacaactcgactcgtcagaagggcctcacaggtgtcgacatgcacgatacggggctctcaccctcagtggcaccctgttccaagggacttgcacacacgtctaacccgagactccaacctgcaatttacaactcgcacactaggtgagatttcaaatctgagctcttgccgcttcactcgccgctactgaggcaatccctgttggtttcttttcctccgcttattgatatgccttaagttcagcgggttattctaccggatctgaggtcgagcttagttaaaagttctcggcggccaaagctttccaataatgttagttcacttcgtccacgacgttccatttcgaaaaaggcatagcctgttctcaactctgcttgcgcaagaaggaaacgacgctcagacaggcatgccccatggaataccatggggcgcaatgtgcgttcaagaactcgatgattcacgatggctgcaattcacactaggtatcgcatttcgctgcgctcttcatcgatgcgagaaccaagagatccgttgttgaaagttttgttttgttaaaacttagtgactggtattattacaattttaggtgtttggtgcgctcacgcatgtgtataagatataaatcacagtaatgatccttccgcaggttcacctacggaaaccttgttacgacttttacgacctctaaatgaccaagtttgactgaattttcagcgccatgggaaagttgcccctcccgcggcgccaatcttggagcctcactaagccattcaatcggtagtagcgacgggcggtgtgtacaaagggcagggacgtaatcaacgcaagctgatgacttgcgcttactaggaattcctcgttgaagagcaaaaattacaatgctctatccccagcacgacggagtttcacgagattacccgggcctctcgaccaaggatatacttgctggctccgtcagtgtagcgcgcgtgcggcccagaacgtctaagggcatcacagacctgttgttgcctcaaacttccatgggtttgaaacccatagtccctctaagaagagcccacgagcagatgctcgcagccctatttagcaggttaaggtctcgtccgttatcgcaattaagcagacaaatcactccaaggactaaaaacggccatgcaccaccacccgtaagatcaagagaagtctctagcttgtcaatccttattacgtctggacctggtgagtttccccgtgttgagtcaaattaagccgcaggctccactcctggtggtgcccttccgtcaattcctttaagtttcagccttgcaaccatactccccccagaacccaaagactttgatttctcgtaaggtgccgagtgggcaagaagcgccacccgatccctagtcggcatagtttatggttaagactacgacggtatctgatcatcttcgatcccctaactttcgttcttgattaatgaaaacgtccttggcaaatgctttcgcagtagttagtcttcagttaatccaagaatttcacctctgacaactgaatactgatgcccccgaccgtccctattaatcattacgatggtcctagaaaccaacaaaatagaaccataacgtcctattctattattccatgctaatatatccgagcaaaggcctgctttgaacactctaatttcctcaaagtaatcgtcctggttcactccgaagagttagccagaaggaaaagacccggccgcaacagtacttaccataggtagaccgcccgcccaggcccaaagttcaactacgagctttttaactgcaacaactttaatatacgctattggagctggaattaccgcggctgctggcaccagacttgccctccaattgttcctcgttaaggtatttacattgtactcattccaattacaagaccaatggccctgtatcgttatatattgtcactacctccctgtgtcaggattgggtaatttgcgcgcctgctgccttccttggatgtggtagccgtttctcaggctccctctccggaatcgaacccttattccccgttacccgtgaaaaccatggtaggcctctatcctaccatcgaaagttgatagggcagaaatttgaatgaaccagctccagcacaaaggccatgagcttcgaaaagttattatgaatcatcaaaaggcccgagggcattgattttttatctaataaatacacccctcccgaagtcggggctttacgcatgtattagctctagattttccacggttatccatgtagaacggaactatcaaataaacgataactgatttaatgagccattcgcagtttcaccgtataatgcttatacttagacatgcatggcttaatctttgagacaagcatatgactactggcaggatcaaccagataactacgctcagatgagttttgttatgatgattggattaacctacacatagcactgtttgactttcttcaacggaggtcccctgtacaaagtacagcttcgtccgcttcagtggagagtggtcccagatgtcacgtttgcacggctacatctccaaccccgtccccaataaacctagtggtccgctggctatcagctagcaacccaccggccccgtcagtgcgcaccacggtcgcaagaccacaatgcccctgtccaagacttgcgtctcttgtccccggccatacccaagcttgtccgtagacgcccctgcatactctccgtgggatcttggcctatcggtgcacaacaccgctaagaaccgcattttttaagtgcttttctcatgtatatcccccggactgcgtaatcttgccaaaaattcgcagcgcgcgttggccgcggcgtccaggagttaaattggacttcgttttggcgtgcaatgttttcgagcgcgaggtgaagtttttctttttgtcaatgctgctgagccgtcagccgtgcatgcatttctaacaaatcccattttgcaaacttgcccaatatgccttcctacaccttcataattacatggcacactatacagagcatcctgatcaacatatctttgtaactaagcaataggacagaaactaggaaattttgatgtgtgttttccttcactgggcactgcccatggaatgtaatacttgcccgacaaaaactttcaatcttcccagcgaatctcaaaatttaaaaaaaattcaaaactctcacagtctacttcccacgaaattcccacttcactgggcaacaataccaacaccccccgtaactcccctctcaggccggattttccaattccaatctctgttctctactctccctggcctcttgtacctcctaccactctcagaatcctgacttagtgattttgaaatttctcatattgggtttctacccggcagctgcccatgaaaaaatgtctactgggcaactccccagtgaacaccctcgctgtgcatttttctcactttgccaaaatttccagccaagtactcacacaatttgtctgcttgcccacgaagggcctcttcactgggcacagctccactgggcactcccagtcaacttgcccatgaaaccacttctctccagatgaactttggttttggccaatttccattatgcccatgttaaacactgctcctagagagtaaaacacgctgatcaaaactatctacaaggcatgtctctagctggcgtggttgtcgagatattcactgttgaacttggcactctactaacttcacctatttatttctccacaaccagtgcgtctttcgctttgataattttatttcataataaacaccactggatctccacatcaagcatataatatcatcaaaaagaacatactttgttttttattacaccctccctgttgtacccatatcacactttacccttctaactcctccaatacgctaaaatatgcccatgttaaatctttaccactatattctacgctctctgttgcccatccaactctaaaaagtcaaaaaaaacaacataaaaaatacttcttccaactagtacatccatcaacacacatattcccaatgaaattcttcacttacctcccatgaaaaataaaaaatcatattttcaccccttcttttgcctccataaaatttacacagatactcctgaacaatccgattccaacgcactgggtctcgtgtcctcagcacgtctgtagcccgagaaaaaaggcctttttcattttgacatccataataccgcccgaaatcgaacactgtcggttgcggccatatctagcagaaagcaccgtttcccgtccgatcaactgtagttaagctgctaagagcctgaccgagtagtgtagtgggagaccatatgcgaaactcaggtgctgcaatctttttttttcatagtatttttcatagtagtgtattttcctgtggcgtattgcgtattattttttgcggcgcatttctctcgtggaggctcgtcacttttttacggaggctcatctttttcagaatttctcgccaattttccgaacccaattttgcggaggctcgtcacttttttacggaggctcatctttttcagaatttctcgccaaatttccgaacccaaaattccggaggctcgtcactttcaaaaatttctcaaatttccgaacccaattttgcggaggctcgtcacttttcaccacgcgcgccaattttccgaacccaattttccgctgcgccacaggcaccgcatgcgccactactgcctgcaccgccacccgccaccgccacatttttccacttttcgtcgagtcgaaaaaattgttttttctcacgagcccctcgacttttttcttatcgtacgctgctgagccgctatcagtgtgctgagccgccacgccaagccgccacgacaccactttcgttgtcttttggttatgtccgttatcaccttctgtttactatcttcttactcccgcagtcattctacacactacatatacctacatgcgcacaaaaattcaggcttcacacccataccctacactagtgcatacctgctctggttgtccagatataagcgttcaaagttagtcaaaaatcccatattttgacctctaggtgtaaaataaattactttcttaataatttccaaaaagtgcgttttttactttttagctcttttttcgggtcgttgcgtctctacatactaattttcgtgctacagccgtgcagtgaaaatttttcaccaccatatttccctaatttctgtgcgtcacttgcctctttgggacgttcccagcccttttttccccaaacccctctgtccgcacgtgattctttctccagagtcaactccctctgactcttcttctctttggttctttaatatgactctgtgtcttgacttctacttattcacgtgattgaatcactggagtcatctcacgtgttattgcgctcaccacttcataactaattcagtaatcaagtcttaattaactaagcacaagtctacaggtctatactaatctccactgtacatcttaagtaatcactacactacgtaatcataagtcttaatctccgcgggccactgtacgtcttatgtaatcactacactacgtaatcataagtcttaatctcctctgacatcatagctattctccttatgtaatcaataatccctaccctaccactctcctcccttacgtaagcataaatcccgtctgacattatttgaaaaaatcctaagtccaaaacaggtaaaatatgcctacccagacgatcgacccaaatccaccacccccgtcctcacgtataccatacaccaagccacggactaggaattaatggcacccaacagcatcgcccaccacccggccacgccggcatccccaaatctcgccgaaatacccagctcgcatctgcaaactgcaacttcgccgccgaagcaacaaatcggacaacagaggcttaatctcagcagatcgtaacaacaaggctactctactgcttacaataccccgttgtacatctaagtcgtatgcaaaggatttatcctcgcgcatcctgacattgccatccgccggcaagcacacgcagcctttccgccacgcgcaccgctgccgacctactacggttctgcgacacaagtgccttattcttatccttctcaaatgtgcgagggcaagtaatcgtcgcgttctagcatggattctgacttagaggcgttcagccattatccagcagatggtagcttcgcggcagtgtctgctcagacagccgcaaaaaccaattatctgaatgaacggttcctctcgtactaagttcaattactattgcgacaacattcatcagtagggtaaaactaacctgtctcacgacggtctaaacccagctcacgttccctattagtgggtgaacaatccaacgcttaccgaattctgcttcggtatgataggaagagccgacatcgaagaatcaaaaagcaatgtcgctatgagcgcttgactgccacaagccagttatccctgtggtaacttttctggcacctctagcctcaaattccgagggactaaaggatcgataggccacactttcatggtttgtattcacactgaaaatcaaaatcaaggggacttttacccttttgttctactggagatttctgttctccatgagtcccccttaggacatctgcgttatcgtttaacagatgtgccgccccagccaaactccccacctgacaatgtcatcaacccggatcggcacacaagatgccttcgcactagaacgtggtcgtcaagaccagctccgcttcattgaataagtaaaaaaacgataaaggtagtggtatttcactggcgccggagctcccacttatgctacaccctctatgtcttttcacaatgtcaaactagagtcaagctcaacagggtcttctttccccgctgattctgccaagcccgttcccttggctgtggtttcgctagatagtagatagggacagtgggaatctcgttaatccattcatgcgcgtcactaattagatgacgaggcatttggctaccttaagagagtcatagttactcccgccgtttacccgcgcttggttgaatttcttcactttgacattcagagcactgggcagaaatcacattgcgtcaacatcactttctgaccatcgcaatgctatgttttaattagacagtcagattccccttgtccgtaccagttctaagttggttgttaaccgtggaggccgcaagcgcaagcgtagctagcagcaccgcccccgaagaagcagcgccagcacgcatggccagcacaggaagcacatccacccaacccttagagccaatccttatcccgaagttacggatctattttgccgacttcccttatctacattattctatcaactagaggctgttaaccttggagacctgctgcggttatgagtacgacttggcgtgaaaactattccttcctgcggattttcaaggaccgtcgcaagcgcaccggacgtcgcaaacaaaggcgacgctcttccagccataagaccccctctccggataaaccaattccagggtgataagctgttaagaagaaaagaaaactcctcccagggctcccgccggcgtctccgcattctgttacgttgccgtgaagaatccacatccaagttccggaattttaaccggattccctttcgatggtggtgcaaagaattgcacacgttgaaacggagcttccccatctcttaggatcgactaacccgcgtccaactgctgttgacgcggaacctttccccacttcagtcttcaaagttctcatttgaatatttgctactaccaccaagatctgcactaggggccgttcgacccaggctcacgcccaaggcttcgtcacaaacccccacgcctgcctactcgccaaggcatcacgccatggcggcaaagtataggtaacacgcttgagcgccatccattttcagggctagttcattcggccggtgagttgttacacactccttagcggattccgacttccatggccaccgtccggctgtctggatgaactaacaccttttgtggtgtctgatgagcgtgcattccggcaccttaactttgcgttcggttcatcccgcatcgccagttctgcttaccaaaaatggcccactaaaagctctgcattcaaacgtccgcgttcaataaagcaacagggacttcttacatatttaaagtttgagaatacgctaaggtcatttcgaccccgagacgtctaatcattcgctttacctcataaaactgatacgagcttctgctatcctgagggaaacttcggcaggaaccagctactagatggttcgattagtctttcgcccctatacccaaattcgacgatcgatttgcacgtcagaaccgctacgagcctccaccagagtttcctctggcttcaccctattcaggcatagttcaccatctttcgggtcccaacagctatgctcttactcaaatccatccgataaacatcaggatcggtcgatcgtgcccgcccccgagagagcggtccgacctacgttcactttcattacgcgtacgggttttacacccaaacactcgcatagacgttagactccttggtccatgtttcaagacgggcggtattgcgccgttgtgccagcatccgagacgaaacgagtccgccgcagccctcggtccccatacgcagcatctacaaaaggctataacactccgaggagccacattccaattgtccttatcctgcaacgaaaaccgatgctggcccaggaaaaacccagagcgccgcccacgagaggcaacgatgcgtaaatcccatgtcgagcccaatacccttccctttcaacaatttcacgtgctgtttcactctcttttcaaagtgcttttcatctttccttcacagtacttgttcgctatcggtctctcgccaatatttagccttagatggaatttaccacccacttagagctgcattcccaaacaactcgactcgtcagaagggcctcacaggtgtcgacatgcacgatacggggctctcaccctcagtggcaccctgttccaagggacttgcacacacgtctaacccgagactccaacctgcaatttacaactcgcacactaggtgagatttcaaatctgagctcttgccgcttcactcgccgctactgaggcaatccctgttggtttcttttcctccgcttattgatatgcttaagttcagcgggtattcctacctgatctgaggtcgagcttagttaaaagttcggcggccaaagcgttccaataatttagttcacttcgtccacgacgttccatttcgaaaaaggcatagcctgttctcaactctgcttgcgcaagaaggaaacgacgctcagacaggcatgccccatggaataccatggggcgcaatgtgcgttcaagaactcgatgattcacgatggctgcaattcacactaggtatcgcatttcgctgcgctcttcatcgatgcgagaaccaagagatccgttgttgaaagttttgttttgttaaaacttagtgactggtattattacaattttaggtgtttggtgcgctcacgcatgtgtataagatataaatcacagtaatgatccttccgcaggttcacctacggaaaccttgttacgacttttacgacctctaaatgaccaagtttgactgaattttcagcgccatgggaaagttgcccctcccgcggcgccaatcttggagcctcactaagccattcaatcggtagtagcgacgggcggtgtgtacaaagggcagggacgtaatcaacgcaagctgatgacttgcgcttactaggaattcctcgttgaagagcaaaaattacaatgctctatccccagcacgacggagtttcacgagattacccgggcctctcgaccaaggatatacttgctggctccgtcagtgtagcgcgcgtgcggcccagaacgtctaagggcatcacagacctgttgttgcctcaaacttccatgggtttgaaacccatagtccctctaagaagagcccacgagcagatgctcgcagccctatttagcaggttaaggtctcgtccgttatcgcaattaagcagacaaatcactccaaggactaaaaacggccatgcaccaccacccgtaagatcaagagaagtctctagcttgtcaatccttattacgtctggacctggtgagtttccccgtgttgagtcaaattaagccgcaggctccactcctggtggtgcccttccgtcaattcctttaagttcagcctttgcaaccatactcccccagaaaccaaagactttgatttctcgtaaggtgccgagtgggcaagaagcgccaccgatccctagtcggcatagtttatggttaagactacgacggtatctgatcatcttcgatccccctaacttgtcttgattaatgaaaacgtccttggcaaatgctttcgcagtagttagtcttcagttaatccaagaatttcacctctgacaactgaatactgatgcccccgaccgtccctattaatcattacgatggtcctagaaaccaacaaaatagaaccataacgtcctattctattattccatgctaatatatccgagcaaaggcctgctttgaacactctaatttcctcaaagtaatcgtcctggttcactccgaagagttagccagaaggaaaagacccggccgcaacagtacttaccataggtagaccgcccgcccaggcccaaagttcaactacgagctttttaactgcaacaactttaatatacgctattggagctggaattaccgcggctgctggcaccagacttgccctccaattgttcctcgttaaggtatttacattgtactcattccaattacaagaccaatggccctgtatcgttatatattgtcactacctccctgtgtcaggattgggtaatttgcgcgcctgctgccttccttggatgtggtagccgtttctcaggctccctctccggaatcgaacccttattccccgttacccgtgaaaaccatggtaggcctctatcctaccatcgaaagttgatagggcagaaatttgaatgaaccagctccagcacaaaggccatgagcttcgaaaagttattatgaatcatcaaaaggcccgagggcattgattttttatctaataaatacacccctcccgaagtcggggctttacgcatgtattagctctagattttccacggttatccatgtagaacggaactatcaaataaacgataactgatttaatgagccattcgcagtttcaccgtataatgcttatacttagacatgcatggcttaatctttgagacaagcatatgactactggcaggatcaaccagataactacgctcagatgagttttgttatgatgattggattaacctacacatagcactgtttgactttcttcaacggaggtcccctgtacaaagtacagcttcgtccgcttcagtggagagtggtcccagatgtcacgtttgcacggctacatctccaaccccgtccccaataaacctagtggtccgctggctatcagctagcaacccaccggccccgtcagtgcgcaccacggtcgcaagaccacaatgcccctgtccaagacttgcgtctcttgtccccggccatacccaagcttgtccgtagacgcccctgcatactctccgtgggatcttggcctatcggtgcacaacaccgctaagaaccgcattttttaagtgcttttctcatgtatatcccccggactgcgtaatcttgccaaaaattcgcagcgcgcgttggccgcggcgtccaggagttaaattggacttcgttttggcgtgcaatgttttcgagcgcgaggtgaagtttttctttttgtcaatgctgctgagccgtcagccgtgcatgcatttctaacaaatcccattttgcaaacttgcccaatatgccttcctacaccttcataattacatggcacactatacagagcatcctgatcaacatatctttgtaactaagcaataggacagaaactaggaaattttgatgtgtgttttccttcactgggcactgcccatggaatgtaatacttgcccgacaaaaactttcaatcttcccagcgaatctcaaaatttaaaaaaaattcaaaactctcacagtctacttcccacgaaattcccacttcactgggcaacaataccaacaccccccgtaactcccctctcaggccggattttccaattccaatctctgttctctactctccctggcctcttgtacctcctaccactctcagaatcctgacttagtgattttgaaatttctcatattgggtttctacccggcagctgcccatgaaaaaatgtctactgggcaactccccagtgaacaccctcgctgtgcatttttctcactttgccaaaatttccagccaagtactcacacaatttgtctgcttgcccacgaagggcctcttcactgggcacagctccactgggcactcccagtcaacttgcccatgaaaccacttctctccagatgaactttggttttggccaatttccattatgcccatgttaaacactgctcctagagagtaaaacacgctgatcaaaactatctacaaggcatgtctctagctggcgtggttgtcgagatattcactgttgaacttggcactctactaacttcacctatttatttctccacaaccagtgcgtctttcgctttgataattttatttcataataaacaccactggatctccacatcaagcatataatatcatcaaaaagaacatactttgttttttattacaccctccctgttgtacccatatcacactttacccttctaactcctccaatacgctaaaatatgcccatgttaaatctttaccactatattctacgctctctgttgcccatccaactctaaaaagtcaaaaaaaacaacataaaaaatacttcttccaactagtacatccatcaacacacatattcccaatgaaattcttcacttacctcccatgaaaaataaaaaatcatattttcaccccttcttttgcctccataaaatttacacagatactcctgaacaatccgattccaacgcactgggtctcgtgtcctcagcacgtctgtagcccgagaaaaaaggcctttttcattttgacatccataataccgcccgaaatcgaacactgtcggttgcggccatatctagcagaaagcaccgtttcccgtccgatcaactgtagttaagctgctaagagcctgaccgagtagtgtagtgggagaccatatgcgaaactcaggtgctgcaatctttttttttcatagtatttttcatagtagtgtattttcctgtggcgtattgcgtattatttttgcggcgcatttctctcgtggaggctcgtcacttttttacggaggctcatctttttcagaatttctcgccaattttccgaacccaattttgcggaggctcgtcacttttttacggaggctcatctttttcagaatttctcgccaaatttccgaacccaaaattccggaggctcgtcactttcaaaaatttctcaaatttccgaacccaattttgcggaggctcgtcacttttcaccacgcgcgccaattttccgaacccaattttccgctgcgccacaggcaccgcatgcgccactactgcctgcaccgccacccgccaccgccacatttttccacttttcgtcgagtcgaaaaaattgttttttctcacgagcccctcgacttttttcttatcgtacgctgctgagccgctatcagtgtgctgagccgccacgccaagccgccacgacaccactttcgttgtcttttggttatgtccgttatcaccttctgtttactatcttcttactcccgcagtcattctacacactacatatacctacatgcgcacaaaaattcaggcttcacacccataccctacactagtgcatacctgctctggttgtccagatataagcgttcaaagttagtcaaaaatcccatattttgacctctaggtgtaaaataaattactttcttaataatttccaaaaagtgcgttttttactttttagctcttttttcgggtcgttgcgtctctacatactaattttcgtgctacagccgtgcagtgaaaatttttcaccaccatatttccctaatttctgtgcgtcacttgcctctttgggacgttcccagcccttttttccccaaacccctctgtccgcacgtgattctttctccagagtcaactccctctgactcttcttctctttggttctttaatatgactctgtgtcttgacttctacttattcacgtgattgaatcactggagtcatctcacgtgttattgcgctcaccacttcataactaattcagtaatcaagtcttaattaactaagcacaagtctacaggtctatactaatctccactgtacatcttaagtaatcactacactacgtaatcataagtcttaatctccgcgggccactgtacgtcttatgtaatcactacactacgtaatcataagtcttaatctcctctgacatcatagctattctccttatgtaatcaataatccctaccctaccactctcctcccttacgtaagcataaatcccgtctgacattatttgaaaaaatcctaagtccaaaacaggtaaaatatgcctacccagacgatcgacccaaatccaccacccccgtcctcacgtataccatacaccaagccacggactaggaattaatggcacccaacagcatcgcccaccacccggccacgccggcatccccaaatctcgccgaaatacccagctcgcatctgcaaactgcaacttcgccgccgaagcaacaaatcggacaacagaggcttaatctcagcagatcgtaacaacaaggctactctactgcttacaataccccgttgtacatctaagtcgtatgcaaaggatttatcctcgcgcatcctgacattgccatccgccggcaagcacacgcagcctttccgccacgcgcaccgctgccgacctactacggttctgcgacacaagtgccttattcttatccttctcaaatgtgcgagggcaagtaatcgtcgcgttctagcatggattctgacttagaggcgttcagccattatccagcagatggtagcttcgcggcagtgtctgctcagacagccgcaaaaaccaattatctgaatgaacggttcctctcgtactaagttcaattactattgcgacaacattcatcagtagggtaaaactaacctgtctcacgacggtctaaacccagctcacgttccctattagtgggtgaacaatccaacgcttaccgaattctgcttcggtatgataggaagagccgacatcgaagaatcaaaaagcaatgtcgctatgagcgcttgactgccacaagccagttatccctgtggtaacttttctggcacctctagcctcaaattccgagggactaaaggatcgataggccacactttcatggtttgtattcacactgaaaatcaaaatcaaggggacttttacccttttgttctactggagatttctgttctccatgagtcccccttaggacatctgcgttatcgtttaacagatgtgccgccccagccaaactccccacctgacaatgtcatcaacccggatcggcacacaagatgccttcgcactagaacgtggtcgtcaagaccagctccgcttcattgaataagtaaaaaaacgataaaggtagtggtatttcactggcgccggagctcccacttatgctacaccctctatgtcttttcacaatgtcaaactagagtcaagctcaacagggtcttctttccccgctgattctgccaagcccgttcccttggctgtggtttcgctagatagtagatagggacagtgggaatctcgttaatccattcatgcgcgtcactaattagatgacgaggcatttggctaccttaagagagtcatagttactcccgccgtttacccgcgcttggttgaatttcttcactttgacattcagagcactgggcagaaatcacattgcgtcaacatcactttctgaccatcgcaatgctatgttttaattagacagtcagattccccttgtccgtaccagttctaagttggttgttaaccgtggaggccgcaagcgcaagcgtagctagcagcaccgcccccgaagaagcagcgccagcacgcatggccagcacaggaagcacatccacccaacccttagagccaatccttatcccgaagttacggatctattttgccgacttcccttatctacattattctatcaactagaggctgttaaccttggagacctgctgcggttatgagtacgacttggcgtgaaaactattccttcctgcggattttcaaggaccgtcgcaagcgcaccggacgtcgcaaacaaaggcgacgctcttccagccataagaccccctctccggataaaccaattccagggtgataagctgttaagaagaaaagaaaactcctcccagggctcccgccggcgtctccgcattctgttacgttgccgtgaagaatccacatccaagttccggaattttaaccggattccctttcgatggtggtgcaaagaattgcacacgttgaaacggagcttccccatctcttaggatcgactaacccgcgtccaactgctgttgacgcggaacctttccccacttcagtcttcaaagttctcatttgaatatttgctactaccaccaagatctgcactaggggccgttcgacccaggctcacgcccaaggcttcgtcacaaacccccacgcctgcctactcgccaaggcatcacgccatggcggcaaagtataggtaacacgcttgagcgccatccattttcagggctagttcattcggccggtgagttgttacacactccttagcggattccgacttccatggccaccgtccggctgtctggatgaactaacaccttttgtggtgtctgatgagcgtgcattccggcaccttaactttgcgttcggttcatcccgcatcgccagttctgcttaccaaaaatggcccactaaaagctctgcattcaaacgtccgcgttcaataaagcaacagggacttcttacatatttaaagtttgagaatacgctaaggtcatttcgaccccgagacgtctaatcattcgctttacctcataaaactgatacgagcttctgctatcctgagggaaacttcggcaggaaccagctactagatggttcgattagtctttcgcccctatacccaaattcgacgatcgatttgcacgtcagaaccgctacgagcctccaccagagtttcctctggcttcaccctattcaggcatagttcaccatctttcgggtcccaacagctatgctcttactcaaatccatccgataaacatcaggatcggtcgatcgtgcccgcccccgagagagcggtccgacctacgttcactttcattacgcgtacgggttttacacccaaacactcgcatagacgttagactccttggtccatgtttcaagacgggcggtattgcgccgttgtgccagcatccgagacgaaacgagtccgccgcagccctcggtcccatacgcagcatctacaaaaggctataacactccgaggagccacattccaattgtccttatcctgcaacgaaaaccgatgctggcccaggaaaaacccagagcgccgcccacgagaggcaacgatgcgtaaatcccatgtcgagcccaatacccttccctttcaacaatttcacgtgctgtttcactctcttttcaaagtgcttttcatctttccttcacagtacttgttcgctatcggtctctcgccaatatttagccttagatggaattaccacccacttagagctgcattcccaaacaactcgactcgtcagaagggcctcacaggtgtcgacatgcacgatacggggctctcaccctcagtggcaccctgttccaagggacttgcacacacgtctaacccgagactccaacctgcaatttacaactcgcacactaggtgagatttcaaatctgagctcttgccgcttcactcgccgctactgaggcaatccctgttggtttcttttcctccgcttattgatatgcttaagttcagcgggtattcctacctgatctgaggtcgagcttagttaaaagttcggcggccaaagcgttccaataatttagttcacttcgtccacgacgttccatttcgaaaaaggcatagcctgttctcaactctgcttgcgcaagaaggaaacgacgctcagacaggcatgccccatggaataccatggggcgcaatgtgcgttcaagaactcgatgattcacgatggctgcaattcacactaggtatcgcatttcgctgcgctcttcatcgatgcgagaaccaagagatccgttgttgaaagttttgttttgttaaaacttagtgactggtattattacaattttaggtgttggtgcgctcacgcatgtgtataagatataaatcacagtaatgatccttccgcaggttcacctacggaaaccttgttacgacttttacgacctctaaatgaccaagtttgactgaattttcagcgccatgggaaagttgcccctcccgcggcgccaatcttggagcctcactaagccattcaatcggtagtagcgacgggcggtgtgtacaaagggcagggacgtaatcaacgcaagctgatgacttgcgcttactaggaattcctcgttgaagagcaaaaattacaatgctctatccccagcacgacggagtttcacgagattacccgggcctctcgaccaaggatatacttgctggctccgtcagtgtagcgcgcgtgcggccagaacgtaaagggcatcacagacctgttgttgcctcaaacttccatgggttgaaacccatagtccctctaagaagagcccacgagcagatgctcgcagccctattagcaggttaaggtctcgtccgttatcgcaattaagcagacaaatcactccaaggactaaaaacggccatgcaccaccacccgtaagatcaagagaagtctctagcttgtcaatccttattacgtctggacctggtgagtttccccgtgttgagtcaaattaagccgcaggctccactcctggtggtgcccttccgtcaattcctttaagtttcagccttgcaaccatactccccccagaacccaaagactttgatttctcgtaaggtgccgagtgggcaagaagcgccacccgatccctagtcggcatagtttatggttaagactacgacggtatctgatcatcttcgatcccctaactttcgttcttgattaatgaaaacgtccttggcaaatgctttcgcagtagttagtcttcagttaatccaagaatttcacctctgacaactgaatactgatgcccccgaccgtccctattaatcattacgatggtcctagaaaccaacaaaatagaaccataacgtcctattctattattccatgctaatatatccgagcaaaggcctgctttgaacactctaatttcctcaaagtaatcgtcctggttcactccgaagagttagccagaaggaaaagacccggccgcaacagtacttaccataggtagaccgcccgcccaggcccaaagttcaactacgagctttttaactgcaacaactttaatatacgctattggagctggaattaccgcggctgctggcaccagacttgccctccaattgttcctcgttaaggtatttacattgtactcattccaattacaagaccaatggccctgtatcgttatatattgtcactacctccctgtgtcaggattgggtaatttgcgcgcctgctgccttccttggatgtggtagccgtttctcaggctccctctccggaatcgaacccttattccccgttacccgtgaaaaccatggtaggcctctatcctaccatcgaaagttgatagggcagaaatttgaatgaaccagctccagcacaaaggccatgagcttcgaaaagttattatgaatcatcaaaaggcccgagggcattgattttttatctaataaatacacccctcccgaagtcggggctttacgcatgtattagctctagattttccacggttatccatgtagaacggaactatcaaataaacgataactgatttaatgagccattcgcagtttcaccgtataatgcttatacttagacatgcatggcttaatctttgagacaagcatatgactactggcaggatcaaccagataactacgctcagatgagttttgttatgatgattggattaacctacacatagcactgtttgactttcttcaacggaggtcccctgtacaaagtacagcttcgtccgcttcagtggagagtggtcccagatgtcacgtttgcacggctacatctccaaccccgtccccaataaacctagtggtccgctggctatcagctagcaacccaccggccccgtcagtgcgcaccacggtcgcaagaccacaatgcccctgtccaagacttgcgtctcttgtccccggccatacccaagcttgtccgtagacgcccctgcatactctccgtgggatcttggcctatcggtgcacaacaccgctaagaaccgcattttttaagtgcttttctcatgtatatcccccggactgcgtaatcttgccaaaaattcgcagcgcgcgttggccgcggcgtccaggagttaaattggacttcgttttggcgtgcaatgttttcgagcgcgaggtgaagtttttctttttgtcaatgctgctgagccgtcagccgtgcatgcatttctaacaaatcccattttgcaaacttgcccaatatgccttcctacaccttcataattacatggcacactatacagagcatcctgatcaacatatctttgtaactaagcaataggacagaaactaggaaattttgatgtgtgttttccttcactgggcactgcccatggaatgtaatacttgcccgacaaaaactttcaatcttcccagcgaatctcaaaatttaaaaaaaattcaaaactctcacagtctacttcccacgaaattcccacttcactgggcaacaataccaacaccccccgtaactcccctctcaggccggattttccaattccaatctctgttctctactctccctggcctcttgtacctcctaccactctcagaatcctgacttagtgattttgaaatttctcatattgggtttctacccggcagctgcccatgaaaaaatgtctactgggcaactccccagtgaacaccctcgctgtgcatttttctcactttgccaaaatttccagccaagtactcacacaatttgtctgcttgcccacgaagggcctcttcactgggcacagctccactgggcactcccagtcaacttgcccatgaaaccacttctctccagatgaactttggttttggccaatttccattatgcccatgttaaacactgctcctagagagtaaaacacgctgatcaaaactatctacaaggcatgtctctagctggcgtggttgtcgagatattcactgttgaacttggcactctactaacttcacctatttatttctccacaaccagtgcgtctttcgctttgataattttatttcataataaacaccactggatctccacatcaagcatataatatcatcaaaaagaacatactttgttttttattacaccctccctgttgtacccatatcacactttacccttctaactcctccaatacgctaaaatatgcccatgttaaatctttaccactatattctacgctctctgttgcccatccaactctaaaaagtcaaaaaaaacaacataaaaaatacttcttccaactagtacatccatcaacacacatattcccaatgaaattcttcacttacctcccatgaaaaataaaaaatcatattttcaccccttcttttgcctccataaaatttacacagatactcctgaacaatccgattccaacgcactgggtctcgtgtcctcagcacgtctgtagcccgagaaaaaaggcctttttcattttgacatccataataccgcccgaaatcgaacactgtcggttgcggccatatctagcagaaagcaccgtttcccgtccgatcaactgtagttaagctgctaagagcctgaccgagtagtgtagtgggagaccatatgcgaaactcaggtgctgcaatctttttttttcatagtatttttcatagtagtgtattttcctgtggcgtattgcgtattatttttgcggcgcatttctctcgtggaggctcgtcacttttttacggaggctcatctttttcagaatttctcgccaattttccgaacccaattttgcggaggctcgtcacttttttacggaggctcatctttttcagaatttctcgccaaatttccgaacccaaaattccggaggctcgtcactttcaaaaatttctcaaatttccgaacccaattttgcggaggctcgtcacttttcaccacgcgcgccaattttccgaacccaattttccgctgcgccacaggcaccgcatgcgccactactgcctgcaccgccacccgccaccgccacatttttccacttttcgtcgagtcgaaaaaattgttttttctcacgagcccctcgactttttcttatcgtacgctgctgagccgctatcagtgtgctgagccgccacgccaagccgccacgacaccactttcgttgtcttttggttatgtccgttatcaccttctgtttactatcttcttactcccgcagtcattctacacactacatatacctacatgcgcacaaaaattcaggcttcacacccataccctacactagtgcatacctgctctggttgtccagatataagcgttcaaagttagtcaaaaatcccatattttgacctctaggtgtaaaataaattactttcttaataatttccaaaaagtgcgttttttactttttagctcttttttcgggtcgttgcgtctctacatactaattttcgtgctacagccgtgcagtgaaaatttttcaccaccatatttccctaatttctgtgcgtcacttgcctctttgggacgttcccagcccttttttccccaaacccctctgtccgcacgtgattctttctccagagtcaactccctctgactcttcttctctttggttctttaatatgactctgtgtcttgacttctacttattcacgtgattgaatcactggagtcatctcacgtgttattgcgctcaccacttcataactaattcagtaatcaagtcttaattaactaagcacaagtctacaggtctatactaatctccactgtacatcttaagtaatcactacactacgtaatcataagtcttaatctccgcgggccactgtacgtcttatgtaatcactacactacgtaatcataagtcttaatctcctctgacatcatagctattctccttatgtaatcaataatccctaccctaccactctcctcccttacgtaagcataaatcccgtctgacattatttgaaaaaatcctaagtccaaaacaggtaaaatatgcctacccagacgatcgacccaaatccaccacccccgtcctcacgtataccatacaccaagccacggactaggaattaatggcacccaacagcatcgcccaccacccggccacgccggcatccccaaatctcgccgaaatacccagctcgcatctgcaaactgcaacttcgccgccgaagcaacaaatcggacaacagaggcttaatctcagcagatcgtaacaacaaggctactctactgcttacaataccccgttgtacatctaagtcgtatgcaaaggatttatcctcgcgcatcctgacattgccatccgccggcaagcacacgcagcctttccgccacgcgcaccgctgccgacctactacggttctgcgacacaagtgccttattcttatccttctcaaatgtgcgagggcaagtaatcgtcgcgttctagcatggattctgacttagaggcgttcagccattatccagcagatggtagcttcgcggcagtgtctgctcagacagccgcaaaaaccaattatctgaatgaacggttcctctcgtactaagttcaattactattgcgacaacattcatcagtagggtaaaactaacctgtctcacgacggtctaaacccagctcacgttccctattagtgggtgaacaatccaacgcttaccgaattctgcttcggtatgataggaagagccgacatcgaagaatcaaaaagcaatgtcgctatgagcgcttgactgccacaagccagttatccctgtggtaacttttctggcacctctagcctcaaattccgagggactaaaggatcgataggccacactttcatggtttgtattcacactgaaaatcaaaatcaaggggacttttacccttttgttctactggagatttctgttctccatgagtcccccttaggacatctgcgttatcgtttaacagatgtgccgccccagccaaactccccacctgacaatgtcatcaacccggatcggcacacaagatgccttcgcactagaacgtggtcgtcaagaccagctccgcttcattgaataagtaaaaaaacgataaaggtagtggtatttcactggcgccggagctcccacttatgctacaccctctatgtcttttcacaatgtcaaactagagtcaagctcaacagggtcttctttccccgctgattctgccaagcccgttcccttggctgtggtttcgctagatagtagatagggacagtgggaatctcgttaatccattcatgcgcgtcactaatagatgacgaggcatttggctaccttaagagagtcatagttactcccgccgtttacccgcgcttggttgaatttcttcactttgacattcagagcactgggcagaaatcacattgcgtcaacatcactttctgaccatcgcaatgctatgttttaattagacagtcagattccccttgtccgtaccagttctaagttggttgttaaccgtggaggccgcaagcgcaagcgtagctagcagcaccgcccccgaagaagcagcgccagcacgcatggccagcacaggaagcacatccacccaacccttagagccaatccttatcccgaagttacggatctattttgccgacttcccttatctacattattctatcaactagaggctgttaaccttggagacctgctgcggttatgagtacgacttggcgtgaaaactattccttcctgcggattttcaaggaccgtcgcaagcgcaccggacgtcgcaaacaaaggcgacgctcttccagccataagaccccctctccggataaaccaattccagggtgataagctgttaagaagaaaagaaaactcctcccagggctcccgccggcgtctccgcattctgttacgttgccgtgaagaatccacatccaagttccggaattttaaccggattccctttcgatggtggtgcaaagaattgcacacgttgaaacggagcttccccatctcttaggatcgactaacccgcgtccaactgctgttgacgcggaacctttccccacttcagtcttcaaagttctcatttgaatatttgctactaccaccaagatctgcactaggggccgttcgacccaggctcacgcccaaggcttcgtcacaaacccccacgcctgcctactcgccaaggcatcacgccatggcggcaaagtataggtaacacgcttgagcgccatccattttcagggctagttcattcggccggtgagttgttacacactccttagcggattccgacttccatggccaccgtccggctgtctggatgaactaacaccttttgtggtgtctgatgagcgtgcattccggcaccttaactttgcgttcggttcatcccgcatcgccagttctgcttaccaaaaatggcccactaaaagctctgcattcaaacgtccgcgttcaataaagcaacagggacttcttacatatttaaagtttgagaatacgctaaggtcatttcgaccccgagacgtctaatcattcgctttacctcataaaactgatacgagcttctgctatcctgagggaaacttcggcaggaaccagctactagatggttcgattagtctttcgcccctatacccaaattcgacgatcgatttgcacgtcagaaccgctacgagcctccaccagagtttcctctggcttcaccctattcaggcatagttcaccatctttcgggtcccaacagctatgctcttactcaaatccatccgataaacatcaggatcggtcgatcgtgcccgcccccgagagagcggtccgacctacgttcactttcattacgcgtacgggttttacacccaaacactcgcatagacgttagactccttggtccatgtttcaagacgggcggtattgcgccgttgtgccagcatccgagacgaaacgagtccgccgcagccctcggtccccatacgcagcatctacaaaaggctataacactccgaggagccacattccaattgtccttatcctgcaacgaaaaccgatgctggcccaggaaaaacccagagcgccgcccacgagaggcaacgatgcgtaaatcccatgtcgagcccaatacccttccctttcaacaatttcacgtgctgtttcactctcttttcaaagtgcttttcatctttccttcacagtacttgttcgctatcggtctctcgccaatatttagccttagatggaatttaccacccacttagagctgcattcccaaacaactcgactcgtcagaagggcctcacaggtgtcgacatgcacgatacggggctctcaccctcagtggcaccctgttccaagggacttgcacacacgtctaacccgagactccaacctgcaatttacaactcgcacactaggtgagatttcaaatctgagctcttgccgcttcactcgccgctactgaggcaatccctgttggtttcttttcctccgcttattgatatgcttaagttcagcgggtattcctacctgatctgaggtcgagcttagttaaaagttcggcggccaaagcgttccaataatttagttcacttcgtccacgacgttccatttcgaaaaaggcatagcctgttctcaactctgcttgcgcaagaaggaaacgacgctcagacaggcatgccccatggaataccatggggcgcaatgtgcgttcaagaactcgatgattcacgatggctgcaattcacactaggtatcgcatttcgctgcgctcttcatcgatgcgagaaccaagagatccgttgttgaaagttttgttttgttaaaacttagtgactggtattattacaattttaggtgtttggtgcgctcacgcatgtgtataagatataaatcacagtaatgatccttccgcaggttcacctacggaaaccttgttacgacttttacgacctctaaatgaccaagtttgactgaattttcagcgccatgggaaagttgcccctcccgcggcgccaatcttggagcctcactaagccattcaatcggtagtagcgacgggcggtgtgtacaaagggcagggacgtaatcaacgcaagctgatgacttgcgcttactaggaattcctcgttgaagagcaaaaattacaatgctctatccccagcacgacggagtttcacgagattacccgggcctctcgaccaaggatatacttgctggctccgtcagtgtagcgcgcgtgcggcccagaacgtctaagggcatcacagacctgttgttgcctcaaacttccatgggtttgaaacccatagtccctctaagaagagcccacgagcagatgctcgcagccctatttagcaggttaaggtctcgtccgttatcgcaattaagcagacaaatcactccaaggactaaaaacggccatgcaccaccacccgtaagatcaagagaagtctctagcttgtcaatccttattacgtctggacctggtgagtttccccgtgttgagtcaaattaagccgcaggctccactcctggtggtgcccttccgtcaattcctttaagtttcagccttgcaaccatactccccccagaacccaaagactttgatttctcgtaaggtgccgagtgggcaagaagcgccacccgatccctagtcggcatagtttatggttaagactacgacggtatctgatcatcttcgatcccctaactttcgttcttgattaatgaaaacgtccttggcaaatgctttcgcagtagttagtcttcagttaatccaagaatttcacctctgacaactgaatactgatgcccccgaccgtccctattaatcattacgatggtcctagaaaccaacaaaatagaaccataacgtcctattctattattccatgctaatatatccgagcaaaggcctgctttgaacactctaatttcctcaaagtaatcgtcctggttcactccgaagagttagccagaaggaaaagacccggccgcaacagtacttaccataggtagaccgcccgcccaggcccaaagttcaactacgagctttttaactgcaacaactttaatatacgctattggagctggaattaccgcggctgctggcaccagacttgccctccaattgttcctcgttaaggtatttacattgtactcattccaattacaagaccaatggccctgtatcgttatatattgtcactacctccctgtgtcaggattgggtaatttgcgcgcctgctgccttccttggatgtggtagccgtttctcaggctccctctccggaatcgaacccttattccccgttacccgtgaaaaccatggtaggcctctatcctaccatcgaaagttgatagggcagaaatttgaatgaaccagctccagcacaaaggccatgagcttcgaaaagttattatgaatcatcaaaaggcccgagggcattgattttttatctaataaatacacccctcccgaagtcggggctttacgcatgtattagctctagattttccacggttatccatgtagaacggaactatcaaataaacgataactgatttaatgagccattcgcagtttcaccgtataatgcttatacttagacatgcatggcttaatctttgagacaagcatatgactactggcaggatcaaccagataactacgctcagatgagttttgttatgatgattggattaacctacacatagcactgtttgactttcttcaacggaggtcccctgtacaaagtacagcttcgtccgcttcagtggagagtggtcccagatgtcacgtttgcacggctacatctccaaccccgtccccaataaacctagtggtccgctggctatcagctagcaacccaccggccccgtcagtgcgcaccacggtcgcaagaccacaatgcccctgtccaagacttgcgtctcttgtccccggccatacccaagcttgtccgtagacgcccctgcatactctccgtgggatcttggcctatcggtgcacaacaccgctaagaaccgcattttttaagtgcttttctcatgtatatcccccggactgcgtaatcttgccaaaaattcgcagcgcgcgttggccgcggcgtccaggagttaaattggacttcgttttggcgtgcaatgttttcgagcgcgaggtgaagtttttctttttgtcaatgctgctgagccgtcagccgtgcatgcatttctaacaaatcccattttgcaaacttgcccaatatgccttcctacaccttcataattacatggcacactatacagagcatcctgatcaacatatctttgtaactaagcaataggacagaaactaggaaattttgatgtgtgttttccttcactgggcactgcccatggaatgtaatacttgcccgacaaaaactttcaatcttcccagcgaatctcaaaatttaaaaaaaattcaaaactctcacagtctacttcccacgaaattcccacttcactgggcaacaataccaacaccccccgtaactcccctctcaggccggattttccaattccaatctctgttctctactctccctggcctcttgtacctcctaccactctcagaatcctgacttagtgattttgaaatttctcatattgggtttctacccggcagctgcccatgaaaaaatgtctactgggcaactccccagtgaacaccctcgctgtgcatttttctcactttgccaaaatttccagccaagtactcacacaatttgtctgcttgcccacgaagggcctcttcactgggcacagctccactgggcactcccagtcaacttgcccatgaaaccacttctctccagatgaactttggttttggccaatttccattatgcccatgttaaacactgctcctagagagtaaaacacgctgatcaaaactatctacaaggcatgtctctagctggcgtggttgtcgagatattcactgttgaacttggcactctactaacttcacctatttatttctccacaaccagtgcgtctttcgctttgataattttatttcataataaacaccactggatctccacatcaagcatataatatcatcaaaaagaacatactttgttttttattacaccctccctgttgtacccatatcacactttacccttctaactcctccaatacgctaaaatatgcccatgttaaatctttaccactatattctacgctctctgttgcccatccaactctaaaaagtcaaaaaaaaaaaaaaaaatacttcttccaactagtacatccatcaacacacatattcccaatgaaattcttcacttacctcccatgaaaaataaaaaaatcatattttcaccccttcttttgcctccataaaatttacacagatactcctgaacaatccgattccaacgcactgggtctcgtgtcctcagcacgtctgtagcccgagaaaaaaggcctttttcattttgacatccataataccgcccgaaatcgaacactgtcggttgcggccatatctagcagaaagcaccgtttcccgtccgatcaactgtagttaagctgctaagagcctgagagtagtgtagtgggagaccatatgcgaaactcaggtgctgcatctttttttttcatagtatttttcatagtagtgtattttcctgtggcgtattgcgtattattttttgcggcgcatttctctcgtggaggctcgtcacttttttacggaggctcatctttttcagaatttctcgccaattttccgaacccaattttgcggaggctcgtcacttttttacggaggctcatctttttcagaatttctcgccaaatttccgaacccaaaattccggaggctcgtcactttcaaaaatttctcaaatttccgaacccaattttgcggaggctcgtcacttttcaccacgcgcgccaattttccgaacccaattttccgctgcgccacaggcaccgcatgcgccactactgcctgcaccgccacccgccaccgccacatttttccacttttcgtcgagtcgaaaaattgttttttctcacgagcccctcgacttttttcttatcgtacgctgctgagccgctatcagtgtgctgagccgccacgccaagccgccacgacaccactttcgttgtcttttggttatgtccgttatcaccttctgtttactatcttcttactcccgcagtcattctacacactacatatacctacatgcgcacaaaaattcaggcttcacacccataccctacactagtgcatacctgctctggttgtccagatataagcgttcaaagttagtcaaaaatcccatattttgacctctaggtgtaaaataaattactttcttaataatttccaaaaagtgcgttttttactttttagctcttttttcgggtcgttgcgtctctacatactaattttcgtgctacagccgtgcagtgaaaatttttcaccaccatatttccctaatttctgtgcgtcacttgcctctttgggacgttcccagcccttttttccccaaacccctctgtccgcacgtgattctttctccagagtcaactccctctgacttcttcttctctttggttctttaatatgactctgtgtcttgacttctacttattcacgtgattgaatcactggagtcatctcacgtgttattgcgctcaccacttcataactaattcagtaatcaagtcttaattaactaagcacaaagttctacaggtctatactaatctccactgtacatcttaagtaatcactacactacgtaatcataagtctaatctccgcgggcccactgtacgtcttatgtaatcactacactacgtaatcataagtcttaatctcctctgacatcatagctattctccttatgtaatcaataatccctacctaccactctcctcccttacgtaagcataaatcccgtctgacattatttgaaaaaatcctaagtccaaaacaggtaaaatatgcctacccagacgatcgacccaaatccaccacccccgtcctcacgtataccatacaccaagccacggactaggaattaatggcacccaacagcatcgcccaccacccggccacgccggcatccccaaatctcgccgaaatacccagctcgcatctgcaaactgcaacttcgccgccgaagcaacaaatcggacaacagaggcttaatctcagcagatcgtaacaacaaggctactctactgcttacaataccccgttgtacatctaagtcgtatgcaaaggatttatcctcgcgcatcctgacattgccatccgccggcaagcacacgcagcctttccgccacgcgcaccgctgccgacctactacggttctgcgacacaagtgccttattcttatccttctcaaatgtgcgagggcaagtaatcgtcgcgttctagcatggattctgacttagaggcgttcagccattatccagcagatggtagcttcgcggcagtgtctgctcagacagccgcaaaaaccaattatctgaatgaacggttcctctcgtactaagttcaattactattgcgacaacattcatcagtagggtaaaactaacctgtctcacgacggtctaaacccagctcacgttccctattagtgggtgaacaatccaacgcttaccgaattctgcttcggtatgataggaagagccgacatcgaagaatcaaaaagcaatgtcgctatgagcgcttgactgccacaagccagttatccctgtggtaacttttctggcacctctagcctcaaattccgagggactaaaggatcgataggccacactttcatggtttgtattcacactgaaaatcaaaatcaaggggacttttacccttttgttctactggagatttctgttctacatgagtcccccttaggacatctgcgttatcgtttaacagatgtgccgccccagccaaactccccacctgacaatgtcatcaacccggatcggcacacaagatgccttcgcactagaacgtggtcgtcaagaccagctccgcttcattgaataagtaaaaaaacgataaaggtagtggtatttcactggcgccggagctcccacttatgctacaccctctatgtcttttcacaatgtcaaactagagtcaagctcaacagggtcttctttccccgctgattctgccaagcccgttcccttggctgtggtttcgctagatagtagatagggacagtgggaatctcgttaatccattcatgcgcgtcactaattagatgacgaggcatttggctaccttaagagagtcatagttactcccgccgtttacccgcgcttggttgaatttcttcactttgacattcagagcactgggcagaaatcacattgcgtcaacatcactttctgaccatcgcaatgctatgttttaattagacagtcagattccccttgtccgtaccagttctaagttggttgttaaccgtggaggccgcaagcgcaagcgtagctagcagcaccgcccccgaagaagcagcgccagcacgcatggccagcacaggaagcacatccacccaacccttagagccaatccttatcccgaagttacggatctattttgccgacttcccttatctacattattctatcaactagaggctgttaaccttggagacctgctgcggttatgagtacgacttggcgtgaaaactattccttcctgcggattttcaaggaccgtcgcaagcgcaccggacgtcgcaaacaaaggcgacgctcttccagccataagaccccctctccggataaaccaattccagggtgataagctgttaagaagaaagaaactcctcccagggctcccgccggcgtctccgcattctgttacgttgccgtgaagaatcaacatccaagtccggaattttaaccggattccctttcgatggtggtgcaaagaattgcacacgttgaaacggagcttccccatctcttaggatcgactaacccgcgccaactgctgttgacgctgaacctttcccacttcagtcttcaaagttctcatttgaatatttgctactaccaccaagatcctgcactaggggccgttcgacccaggctcacgcccaaggcttcgtcacaaaccccccacgcctgcctactcgccaaggcatcacgccatggcggcaaagtataggtaacacgcttgagcgccatccatttcagggctagtttcattcggccggtgagttgttacacactccttagcggattccgacttccatggccaccgtccggctgtctggatgcaactaacacctttgtggtgtctgatgagcgtgcattccggctaccttaactttgcgttcggttcatcccgcatcgccagttctgcttaccaaaaatggcccactaaaagctctgcattcaaacgtccgcgttcaataaagcaacagggacttcttacatatttaaagtttgagataacgctaaggtcatttcgaccccgagacgtctactcattcgctttaccgtcataaaagctgatacgagctttgctatcctgagggaaacttcggcaggaaccagctactagatggttcgattagtctttcgcccctatacccaaattcgacgatcgatttgcacgtcagaaccgctacgagcctccaccagagtttcctctggcttcaccctatcagagcattagttcaccatctttcgggtcccaacagctatgctcttactcaaatccatccgataaacatcaggatcggtcgatcgtgcccgcccccgagagagcggtccgacctacgttcactttcattacgcgtacgggttttacacccaaacactcgcatagacgttagactccttggtccatgtttcaagacgggcggtattgcgccgttgtgccagcatccgagacgaaacgagtccgccgcagccctcggtccccatacgcagcatctacaaaaggctataacactccgaggagccacattccaattgtccttatcctgcaacgaaaaccgatgctggcccaggaaaaacccagagcgccgcccacgagaggcaacgatgcgtaaatcccatgtcgagcccaatacccttccctttcaacaatttcacgtgctgtttcactctcttttcaaagtgcttttcatctttccttcacagtacttgttcgctatcggtctctcgccaatatttagccttagatggaatttaccacccacttagagctgcattcccaaacaactcgactcgtcagaagggcctcacaggtgtcgacatgcacgatacggggctctcaccctcagtggcaccctgttccaagggacttgcacacacgtctaacccgagactccaacctgcaatttacaactcgcacactaggtgagatttcaaatctgagctcttgccgcttcactcgccgctactgaggcaatccctgttggtttcttttcctccgcttattgatatgcttaagttcagcgggtattcctacctgatctgaggtcgagcttagttaaaagttcggcggccaaagcgttccaataatttagttcacttcgtccacgacgttccatttcgaaaaaggcatagcctgttctcaactctgcttgcgcaagaaggaaacgacgctcagacaggcatgccccatggaataccatggggcgcaatgtgcgttcaagaactcgatgattcacgatggctgcaattcacactaggtatcgcatttcgctgcgctcttcatcgatgcgagaaccaagagatccgttgttgaaagttttgttttgttaaaacttagtgactggtattattacaattttaggtgtttggtgcgctcacgcatgtgtataagatataaatcacagtaatgatccttccgcaggttcacctacggaaaccttgttacgacttttacgacctctaaatgaccaagtttgactgaattttcagcgccatgggaaagttgcccctcccgcggcgccaatcttggagcctcactaagccattcaatcggtagtagcgacgggcggtgtgtacaaagggcagggacgtaatcaacgcaagctgatgacttgcgcttactaggaattcctcgttgaagagcaaaaattacaatgctctatccccagcacgacggagtttcacgagattacccgggcctctcgaccaaggatatacttgctggctccgtcagtgtagcgcgcgtgcggcccagaacgtctaagggcatcacagacctgttgttgcctcaaacttccatgggtttgaaacccatagtccctctaagaagagcccacgagcagatgctcgcagccctatttagcaggttaaggtctcgtccgttatcgcaattaagcagacaaatcactccaaggactaaaaacggccatgcaccaccacccgtaagatcaagagaagtctctagcttgtcaatccttattacgtctggacctggtgagtttccccgtgttgagtcaaattaagccgcaggctccactcctggtggtgcccttccgtcaattcctttaagtttcagccttgcaaccatactccccccagaacccaaagactttgatttctcgtaaggtgccgagtgggcaagaagcgccacccgatccctagtcggcatagtttatggttaagactacgacggtatctgatcatcttcgatcccctaactttcgttcttgattaatgaaaacgtccttggcaaatgctttcgcagtagttagtcttcagttaatccaagaatttcacctctgacaactgaatactgatgcccccgaccgtccctattaatcattacgatggtcctagaaaccaacaaaatagaaccataacgtcctattctattattccatgctaatatatccgagcaaaggcctgctttgaacactctaatttcctcaaagtaatcgtcctggttcactccgaagagttagccagaaggaaaagacccggccgcaacagtacttaccataggtagaccgcccgcccaggcccaaagttcaactacgagctttttaactgcaacaactttaatacgctattggagctggaattaccgcggctgctggcaccagacttgccctccaattgttcctcgttaaggtatttacattgtactcattccaattacaagaccaatggccctgtatcgttatatattgtcactacctccctgtgtcaggattgggtaatttgcgcgcctgctgccttccttggatgtggtagccgtttctcaggctccctctccggaatcgaacccttattccccgttacccgtgaaaaccatggtaggcctctatcctaccatcgaaagttgatagggcagaaatttgaatgaaccagctccagcacaaaggccatgagcttcgaaaagttattatgaatcatcaaaaggcccgagggcattgattttttatctaataaatacacccctcccgaagtcggggctttacgcatgtattagctctagattttccacggttatccatgtagaacggaactatcaaataaacgataactgatttaatgagccattcgcagtttcaccgtataatgcttatacttagacatgcatggcttaatctttgagacaagcatatgactactggcaggatcaaccagataactacgctcagatgagttttgttatgatgattggattaacctacacatagcactgtttgactttcttcaacggaggtcccctgtacaaagtacagcttcgtccgcttcagtggagagtggtcccagatgtcacgtttgcacggctacatctccaaccccgtccccaataaacctagtggtccgctggctatcagctagcaacccaccggccccgtcagtgcgcaccacggtcgcaagaccacaatgcccctgtccaagacttgcgtctcttgtccccggccatacccaagcttgtccgtagacgcccctgcatactctccgtgggatcttggcctatcggtgcacaacaccgctaagaaccgcattttttaagtgcttttctcatgtatatcccccggactgcgtaatcttgccaaaaattcgcagcgcgcgttggccgcggcgtccaggagttaaattggacttcgttttggcgtgcaatgttttcgagcgcgaggtgaagtttttctttttgtcaatgctgctgagccgtcagccgtgcatgcatttctaacaaatcccattttgcaaacttgcccaatatgccttcctacaccttcataattacatggcacactatacagagcatcctgatcaacatatctttgtaactaagcaataggacagaaactaggaaattttgatgtgtgttttccttcactgggcactgcccatggaatgtaatacttgcccgacaaaaactttcaatcttcccagcgaatctcaaaatttaaaaaaaattcaaaactctcacagtctacttcccacgaaattcccacttcactgggcaacaataccaacaccccccgtaactcccctctcaggccggattttccaattccaatctctgttctctactctccctggcctcttgtacctcctaccactctcagaatcctgacttagtgattttgaaatttctcatattgggtttctacccggcagctgcccatgaaaaaatgtctactgggcaactccccagtgaacaccctcgctgtgcatttttctcactttgccaaaatttccagccaagtactcacacaatttgtctgcttgcccacgaagggcctcttcactgggcacagctccactgggcactcccagtcaacttgcccatgaaaccacttctctccagatgaactttggttttggccaatttccattatgcccatgttaaacactgctcctagagagtaaaacacgctgatcaaaactatctacaaggcatgtctctagctggcgtggttgtcgagatattcactgttgaacttggcactctactaacttcacctatttatttctccacaaccagtgcgtctttcgctttgataattttatttcataataaacaccactggatctccacatcaagcatataatatcatcaaaaagaacatactttgttttttattacaccctccctgttgtacccatatcacactttacccttctaactcctccaatacgctaaaatatgcccatgttaaatctttaccactatattctacgctctctgttgcccatccaactctaaaaagtcaaaaaaaacaacataaaaaatacttcttccaactagtacatccatcaacacacatattcccaatgaaattcttcacttacctcccatgaaaaataaaaaatcatattttcaccccttcttttgcctccataaaatttacacagatactcctgaacaatccgattccaacgcactgggtctcgtgtcctcagcacgtctgtagcccgagaaaaaaggcctttttcattttgacatccataataccgcccgaaatcgaacactgtcggttgcggccatatctagcagaaagcaccgtttcccgtccgatcaactgtagttaagctgctaagagcctgaccgagtagtgtagtgggagaccatatgcgaaactcaggtgctgcaatctttttttttcatagtatttttcatagtagtgtattttcctgtggcgtattgcgtattattttttgcggcgcatttctctcgtggaggctcgtcacttttttacggaggctcatctttttcagaatttctcgccaattttccgaacccaattttgcggaggctcgtcacttttttacggaggctcatctttttcagaatttctcgccaaatttccgaacccaaaattccggaggctcgtcactttcaaaaatttctcaaatttccgaacccaattttgcggaggctcgtcacttttcaccacgcgcgccaattttccgaacccaattttccgctgcgccacaggcaccgcatgcgccactactgcctgcaccgccacccgccaccgccacatttttccacttttcgtcgagtcgaaaaaattgttttttctcacgagcccctcgacttttttcttatcgtacgctgctgagccgctatcagtgtgctgagccgccacgccaagccgccacgacaccactttcgttgtcttttggttatgtccgttatcaccttctgtttactatcttcttactcccgcagtcattctacacactacatatacctacatgcgcacaaaaattcaggcttcacacccataccctacactagtgcatacctgctctggttgtccagatataagcgttcaaagttagtcaaaaatcccatattttgacctctaggtgtaaaataaattactttcttaataatttccaaaaagtgcgttttttactttttagctcttttttcgggtcgttgcgtctctacatactaattttcgtgctacagccgtgcagtgaaaatttttcaccaccatatttccctaatttctgtgcgtcacttgcctctttgggacgttcccagcccttttttccccaaacccctctgtccgcacgtgattctttctccagagtcaactccctctgactcttcttctctttggttctttaatatgactctgtgtcttgacttctacttattcacgtgattgaatcactggagtcatctcacgtgttattgcgctcaccacttcataactaattcagtaatcaagtcttaattaactaagcacaagtctacaggtctatactaatctccactgtacatcttaagtaatcactacactacgtaatcataagtcttaatctccgcgggccactgtacgtcttatgtaatcactacactacgtaatcataagtcttaatctcctctgacatcatagctattctccttatgtaatcaataatccctaccctaccactctcctcccttacgtaagcataaatcccgtctgacattatttgaaaaaatcctaagtccaaaacaggtaaaatatgcctacccagacgatcgacccaaatccaccacccccgtcctcacgtataccatacaccaagccacggactaggaattaatggcacccaacagcatcgcccaccacccggccacgccggcatccccaaatctcgccgaaatacccagctcgcatctgcaaactgcaacttcgccgccgaagcaacaaatcggacaacagaggcttaatctcagcagatcgtaacaacaaggctactctactgcttacaataccccgttgtacatctaagtcgtatgcaaaggatttatcctcgcgcatcctgacattgccatccgccggcaagcacacgcagcctttccgccacgcgcaccgctgccgacctactacggttctgcgacacaagtgccttattcttatccttctcaaatgtgcgagggcaagtaatcgtcgcgttctagcatggattctgacttagaggcgttcagccattatccagcagatggtagcttcgcggcagtgtctgctcagacagccgcaaaaaccaattatctgaatgaacggttcctctcgtactaagttcaattactattgcgacaacattcatcagtagggtaaaactaacctgtctcacgacggtctaaacccagctcacgttccctattagtgggtgaacaatccaacgcttaccgaattctgcttcggtatgataggaagagccgacatcgaagaatcaaaaagcaatgtcgctatgagcgcttgactgccacaagccagttatccctgtggtaacttttctggcacctctagcctcaaattccgagggactaaaggatcgataggccacactttcatggtttgtattcacactgaaaatcaaaatcaaggggacttttacccttttgttctactggagatttctgttctatgagtcccccttaggacatctgcgttatcgtttaacagatgtgccgccccagccaaactccccacctgacaatgtcatcaacccggatcggcacacaagatgccttcgcactagaacgtggtcgtcaagaccagctccgcttcattgaataagtaaaaaaacgataaaggtagtggtatttcactggcgccggagctcccacttatgctacaccctctatgtcttttcacaatgtcaaactagagtcaagctcaacagggtcttctttccccgctgattctgccaagcccgttcccttggctgtggtttcgctagatagtagatagggacagtgggaatctcgttaatccattcatgcgcgtcactaattagatgacgaggcatttggctaccttaagagagtcatagttactcccgccgtttacccgcgcttggttgaatttcttcactttgacattcagagcactgggcagaaatcacattgcgtcaacatcactttctgaccatcgcaatgctatgttttaattagacagtcagattccccttgtccgtaccagttctaagttggttgttaaccgtggaggccgcaagcgcaagcgtagctagcagcaccgcccccgaagaagcagcgccagcacgcatggccagcacaggaagcacatccacccaacccttagagccaatccttatcccgaagttacggatctattttgccgacttcccttatctacattattctatcaactagaggctgttaaccttggagacctgctgcggttatgagtacgacttggcgtgaaaactattccttcctgcggattttcaaggaccgtcgcaagcgcaccggacgtcgcaaacaaaggcgacgctcttccagccataagaccccctctccggataaaccaattccagggtgataagctgttaagaagaaaagaaaactcctcccagggctcccgccggcgtctccgcattctgttacgttgccgtgaagaatccacatccaagttccggaattttaaccggattccctttcgatggtggtgcaaagaattgcacacgttgaaacggagcttccccatctcttaggatcgactaacccgcgtccaactgctgttgacgcggaacctttccccacttcagtcttcaaagttctcatttgaatatttgctactaccaccaagatctgcactaggggccgttcgacccaggctcacgcccaaggcttcgtcacaaacccccacgcctgcctactcgccaaggcatcacgccatggcggcaaagtataggtaacacgcttgagcgccatccattttcagggctagttcattcggccggtgagttgttacacactccttagcggattccgacttccatggccaccgtccggctgtctggatgaactaacaccttttgtggtgtctgatgagcgtgcattccggcaccttaactttgcgttcggttcatcccgcatcgccagttctgcttaccaaaaatggcccactaaaagctctgcattcaaacgtccgcgttcaataaagcaacagggacttcttacatatttaaagtttgagaatacgctaaggtcatttcgaccccgagacgtctaatcattcgctttacctcataaaactgatacgagcttctgctatcctgagggaaacttcggcaggaaccagctactagatggttcgattagtctttcgcccctatacccaaattcgacgatcgatttgcacgtcagaaccgctacgagcctccaccagagtttcctctggcttcaccctattcaggcatagttcaccatctttcgggtcccaacagctatgctcttactcaaatccatccgataaacatcaggatcggtcgatcgtgcccgcccccgagagagcggtccgacctacgttcactttcattacgcgtacgggttttacacccaaacactcgcatagacgttagactccttggtccatgtttcaagacgggcggtattgcgccgttgtgccagcatccgagacgaaacgagtccgccgcagccctcggtccccatacgcagcatctacaaaaggctataacactccgaggagccacattccaattgtccttatcctgcaacgaaaaccgatgctggcccaggaaaaacccagagcgccgcccacgagaggcaacgatgcgtaaatcccatgtcgagcccaatacccttccctttcaacaatttcacgtgctgtttcactctcttttcaaagtgcttttcatctttccttcacagtacttgttcgctatcggtctctcgccaatatttagccttagatggaatttaccacccacttagagctgcattcccaaacaactcgactcgtcagaagggcctcacaggtgtcgacatgcacgatacggggctctcaccctcagtggcaccctgttccaagggacttgcacacacgtctaacccgagactccaacctgcaatttacaactcgcacactaggtgagatttcaaatctgagctcttgccgcttcactcgccgctactgaggcaatccctgttggtttcttttcctccgcttattgatatgcttaagttcagcgggtattcctacctgatctgaggtcgagcttagttaaaagttcggcggccaaagcgttccaataatttagttcacttcgtccacgacgttccatttcgaaaaaggcatagcctgttctcaactctgcttgcgcaagaaggaaacgacgctcagacaggcatgccccatggaataccatggggcgcaatgtgcgttcaagaactcgatgattcacgatggctgcaattcacactaggtatcgcatttcgctgcgctcttcatcgatgcgagaaccaagagatccgttgttgaaagttttgttttgttaaaacttagtgactggtattattacaattttaggtgtttggtgcgctcacgcatgtgtataagatataaatcacagtaatgatccttccgcaggttcacctacggaaaccttgttacgacttttacgacctctaaatgaccaagtttgactgaattttcagcgccatgggaaagttgcccctcccgcggcgccaatcttggagcctcactaagccattcaatcggtagtagcgacgggcggtgtgtacaaagggcagggacgtaatcaacgcaagctgatgacttgcgcttactaggaattcctcgttgaagagcaaaaattacaatgctctatccccagcacgacggagtttcacgagattacccgggcctctcgaccaaggatatacttgctggctccgtcagtgtagcgcgcgtgcggcccagaacgtctaagggcatcacagacctgttgttgcctcaaacttccatgggtttgaaacccatagtccctctaagaagagcccacgagcagatgctcgcagccctatttagcaggttaaggtctcgtccgttatcgcaattaagcagacaaatcactccaaggactaaaaacggccatgcaccaccacccgtaagatcaagagaagtctctagcttgtcaatccttattacgtctggacctggtgagtttccccgtgttgagtcaaattaagccgcaggctccactcctggtggtgcccttccgtcaattcctttaagtttcagccttgcaaccatactccccccagaacccaaagactttgatttctcgtaaggtgccgagtgggcaagaagcgccacccgatccctagtcggcatagtttatggttaagactacgacggtatctgatcatcttcgatcccctaactttcgttcttgattaatgaaaacgtccttggcaaatgctttcgcagtagttagtcttcagttaatccaagaatttcacctctgacaactgaatactgatgcccccgaccgtccctattaatcattacgatggtcctagaaaccaacaaaatagaaccataacgtcctattctattattccatgctaatatatccgagcaaaggcctgctttgaacactctaatttcctcaaagtaatcgtcctggttcactccgaagagttagccagaaggaaaagacccggccgcaacagtacttaccataggtagaccgcccgcccaggcccaaagttcaactacgagctttttaactgcaacaactttaatatacgctattggagctggaattaccgcggctgctggcaccagacttgccctccaattgttcctcgttaaggtatttacattgtactcattccaattacaagaccaatggccctgtatcgttatatattgtcactacctccctgtgtcaggattgggtaatttgcgcgcctgctgccttccttggatgtggtagccgtttctcaggctccctctccggaatcgaacccttattccccgttacccgtgaaaaccatggtaggcctctatcctaccatcgaaagttgatagggcagaaatttgaatgaaccagctccagcacaaaggccatgagcttcgaaaagttattatgaatcatcaaaaggcccgagggcattgattttttatctaataaatacacccctcccgaagtcggggctttacgcatgtattagctctagattttccacggttatccatgtagaacggaactatcaaataaacgataactgatttaatgagccattcgcagtttcaccgtataatgcttatacttagacatgcatggcttaatctttgagacaagcatatgactactggcaggatcaaccagataactacgctcagatgagttttgttatgatgattggattaacctacacatagcactgtttgactttcttcaacggaggtcccctgtacaaagtacagcttcgtccgcttcagtggagagtggtcccagatgtcacgtttgcacggctacatctccaaccccgtccccaataaacctagtggtccgctggctatcagctagcaacccaccggccccgtcagtgcgcaccacggtcgcaagaccacaatgcccctgtccaagacttgcgtctcttgtccccggccatacccaagcttgtccgtagacgcccctgcatactctccgtgggatcttggcctatcggtgcacaacaccgctaagaaccgcattttttaagtgcttttctcatgtatatcccccggactgcgtaatcttgccaaaaattcgcagcgcgcgttggccgcggcgtccaggagttaaattggacttcgttttggcgtgcaatgttttcgagcgcgaggtgaagtttttctttttgtcaatgctgctgagccgtcagccgtgcatgcatttctaacaaatcccattttgcaaacttgcccaatatgccttcctacaccttcataattacatggcacactatacagagcatcctgatcaacatatctttgtaactaagcaataggacagaaactaggaaattttgatgtgtgttttccttcactgggcactgcccatggaatgtaatacttgcccgacaaaaactttcaatcttcccagcgaatctcaaaatttaaaaaaaattcaaaactctcacagtctacttcccacgaaattcccacttcactgggcaacaataccaacaccccccgtaactcccctctcaggccggattttccaattccaatctctgttctctactctccctggcctcttgtacctcctaccactctcagaatcctgacttagtgattttgaaatttctcatattgggtttctacccggcagctgcccatgaaaaaatgtctactgggcaactccccagtgaacaccctcgctgtgcatttttctcactttgccaaaatttccagccaagtactcacacaatttgtctgcttgcccacgaagggcctcttcactgggcacagctccactgggcactcccagtcaacttgcccatgaaaccacttctctccagatgaactttggttttggccaatttccattatgcccatgttaaacactgctcctagagagtaaaacacgctgatcaaaactatctacaaggcatgtctctagctggcgtggttgtcgagatattcactgttgaacttggcactctactaacttcacctatttatttctccacaaccagtgcgtctttcgctttgataattttatttcataataaacaccactggatctccacatcaagcatataatatcatcaaaaagaacatactttgttttttattacaccctccctgttgtacccatatcacactttacccttctaactcctccaatacgctaaaatatgcccatgttaaatctttaccactatattctacgctctctgttgcccatccaactctaaaaagtcaaaaaaaacaacataaaaaatacttcttccaactagtacatccatcaacacacatattcccaatgaaattcttcacttacctcccatgaaaaataaaaaatcatattttcaccccttcttttgcctccataaaatttacacagatactcctgaacaatccgattccaacgcactgggtctcgtgtcctcagcacgtctgtagcccgagaaaaaaggcctttttcattttgacatccataataccgcccgaaatcgaacactgtcggttgcggccatatctagcagaaagcaccgtttcccgtccgatcaactgtagttaagctgctaagagcctgaccgagtagtgtagtgggagaccatatgcgaaactcaggtgctgcaatctttttttttcatagtatttttcatagtagtgtattttcctgtggcgtattgcgtattattttttgcggcgcatttctctcgtggaggctcgtcacttttttacggaggctcatctttttcagaatttctcgccaattttccgaacccaattttgcggaggctcgtcacttttttacggaggctcatctttttcagaatttctcgccaaatttccgaacccaaaattccggaggctcgtcactttcaaaaatttctcaaatttccgaacccaattttgcggaggctcgtcacttttcaccacgcgcgccaattttccgaacccaattttccgctgcgccacaggcaccgcatgcgccactactgcctgcaccgccacccgccaccgccacatttttccacttttcgtcgagtcgaaaaaattgttttttctcacgagcccctcgacttttttcttatcgtacgctgctgagccgctatcagtgtgctgagccgccacgccaagccgccacgacaccactttcgttgtcttttggttatgtccgttatcaccttctgtttactatcttcttactcccgcagtcattctacacactacatatacctacatgcgcacaaaaattcaggcttcacacccataccctacactagtgcatacctgctctggttgtccagatataagcgttcaaagttagtcaaaaatcccatattttgacctctaggtgtaaaataaattactttcttaataatttccaaaaagtgcgttttttactttttagctcttttttcgggtcgttgcgtctctacatactaattttcgtgctacagccgtgcagtgaaaatttttcaccaccatatttccctaatttctgtgcgtcacttgcctctttgggacgttcccagcccttttttccccaaacccctctgtccgcacgtgattctttctccagagtcaactccctctgactcttcttctctttggttctttaatatgactctgtgtcttgacttctacttattcacgtgattgaatcactggagtcatctcacgtgttattgcgctcaccacttcataactaattcagtaatcaagtcttaattaactaagcacaagtctacaggtctatactaatctccactgtacatcttaagtaatcactacactacgtaatcataagtcttaatctccgcgggccactgtacgtcttatgtaatcactacactacgtaatcataagtcttaatctcctctgacatcatagctattctccttatgtaatcaataatccctaccctaccactctcctcccttacgtaagcataaatcccgtctgacattatttgaaaaaatcctaagtccaaaacaggtaaaatatgcctacccagacgatcgacccaaatccaccacccccgtcctcacgtataccatacaccaagccacggactaggaattaatggcacccaacagcatcgcccaccacccggccacgccggcatccccaaatctcgccgaaatacccagctcgcatctgcaaactgcaacttcgccgccgaagcaacaaatcggacaacagaggcttaatctcagcagatcgtaacaacaaggctactctactgcttacaataccccgttgtacatctaagtcgtatgcaaaggatttatcctcgcgcatcctgacattgccatccgccggcaagcacacgcagcctttccgccacgcgcaccgctgccgacctactacggttctgcgacacaagtgccttattcttatccttctcaaatgtgcgagggcaagtaatcgtcgcgttctagcatggattctgacttagaggcgttcagccattatccagcagatggtagcttcgcggcagtgtctgctcagacagccgcaaaaaccaattatctgaatgaacggttcctctcgtactaagttcaattactattgcgacaacattcatcagtagggtaaaactaacctgtctcacgacggtctaaacccagctcacgttccctattagtgggtgaacaatccaacgcttaccgaattctgcttcggtatgataggaagagccgacatcgaagaatcaaaaagcaatgtcgctatgagcgcttgactgccacaagccagttatccctgtggtaacttttctggcacctctagcctcaaattccgagggactaaaggatcgataggccacactttcatggtttgtattcacactgaaaatcaaaatcaaggggacttttacccttttgttctactggagatttctgttctccatgagtcccccttaggacatctgcgttatcgtttaacagatgtgccgccccagccaaactccccacctgacaatgtcatcaacccggatcggcacacaagatgccttcgcactagaacgtggtcgtcaagaccagctccgcttcattgaataagtaaaaaaacgataaaggtagtggtatttcactggcgccggagctcccacttatgctacaccctctatgtcttttcacaatgtcaaactagagtcaagctcaacagggtcttctttccccgctgattctgccaagcccgttcccttggctgtggtttcgctagatagtagatagggacagtgggaatctcgttaatccattcatgcgcggtcactgaattagatgacgaggcatttggctacttaagagagtcatagttactcccgccgtttacccgcgcttggttgaatttcttcactttgacattcagagcactggcagaaatcacattgcgtcaacatcactttctgaccatcgcaatgctatgttttaattagacagtcagattccccttgtccgtaccagttctaagttggttgttaaccgctggaggccgcaagcgcaagcgtagctagcagcaccgcccccgaagaagcagcgccagcacgcatggccagcacaggaagcacatccacccaacccttagagccaatccttatcccgaagttacggatctattttgccgacttcccttatctacattattctatcaactagaggctgttaaccttggagacctgctgcggttatgagtacgacttggcagtgaaaactattccttcctgcggattttcaaggaccgtcgcaagcgcaccggacgtcgcaaacaaaggcgacgctcttccagccataagaccccctctccggataaaccaattccagggtgataagctgtaagaagaaaagaaaactcctcccagggctcccgccggcgtctccgcattctgttacgttgccgtgaagaatccacatccaagttccggaattttaaaccggattcccttcgatggtggtgcaaagaattgcacacgttgaaacggagcttccccatctcttaggatcgactaacccgcgtccaactgctgttgacgcggaaacctttccccacttcagtcttcaaagttctcatttgaatatttgctactaccaccaagatctgcactaggggccgttcgacccaggctcacgcccaaggcttcgtcacaaacccccacgcctgcctactcgccaaggcatcacgccatggcggcaaagtaataggtaacacgcttgagcgccatccattttcagggctagttcattcggccggtgagttgttacacactccttagcggattccgacttccatggccaccgtccggctgtctggatgaactaacaccttttgtggtgtctgatgagcgtgcattccggcaccttaactttgcgttcggttcatcccgcatcgccagttctgcttaccaaaaattggcccactaaaagctctgcattcaaacgtccgcgttcaataaagcaacagggacttcttacatatttaaagtttgagaatacgctaaggtcatttcgaccccgagacgtctaatcattcgctttacctcataaactgatacgagcttctgctatcctgagggaaacttcggcaggaaccagctactagatggttcgattagtctttcgcccctatacccaaattcgacgatcgagttgcacgtcagaaaccgctacgagcctcaccagagtttcctctggcttcaccctattcagcatagttcaccatctttcgggtcccaacagctatgctcttactcaaatccatccgataacatcaggatcggtcgatcgtgcccgcccccgagagagcggtccgaccctacgttcactttcattacgcgtacgggttttacacccaaacactcgcatagacgttagactccttgtccatgtttcaagacgggcggtattgcgccgttgtgccagcatccgagacgaaaacgagtccgccgcagccctcggtcccaatacgcagcatctacaaaaggctataacactcgaggagccacattccaattgtccttatcctgcaacgaaaaccgatgctggcccaggaaaaacccagagcgccgcccacgagaggcaacgatgcgtaaatcccatgtcgagcccaatacccttccctttcaacaatttcacgttgctgtttcactctcttttcaaagtgcttttcatctttccttcacagtacttgttcgctatcggtctctcgccaatatttagccttagatggaatttaccacccacttagagctgcattcccaaacaactcgactcgtcagaagggcctcacaggtgtcgacatgcacgataccggggctctcaccctcagtggcaccctgttccaagggacttgcacacacgtctaacccgagactccaacctgcaatttacaactcgcacactaggtgagatttcaaatctgagctcttgccgcttcaactcgccgctactgaggcaatccctgttggtttcttttcctccgcttattgatatgcttaagttcagcgggtattcctacctgatatgaggtcgagcttagttaaaagttcggcggccaaagcgttccaataatttagttcaacttcgttccacgacgttccatttcgaaaaaggcatagcctgttctcaactctgcttgcgccaagaaggaaacgacgctcagacaggcatgccccatggaataccatggggcgcaatgtgcgttcaagaactcgatgattcacgatggctgcaattcacactaggtatcgcatttcgctgcgctcttcatcgatgcgagaaccaagagatccgttgttgaaagttttgttttgttaaaacttagtgactggtattattacaattttaggtgtttggtgcgctcacgcatgtgtataagatataaatcacagtaatgatccttccgcaggttcacctacggaaaccttgttacgacttttacgacctctaaatgaccaagtttgactgaatttcagcgccatgggaaagttgcccctcccgcggcgccaatcttggagcctcactaagccattcaatcggtagtagcgacgggcggtgtgtacaaagggcagggacgtaatcacacgcaagctgatgacttgcgcttactaggaaattcctcgttgaagagcaaaaattacaatgctctatccccagcacgacggagtttcacgagattacccgggcctctcgaccaaggatatacttgctggctccgtcagtgtagcgcgcgtgcggcccagaacgtctaagggcatcacagacctgttgttgcctcaaacttccatgggtttgaaacccatagtccctctaagaagagcccacgagcagatgctcgcagccctatttagcaggttaaggtctcgtccgttatcgcaattaagcagacaaatcactccaaggactaaaaaacggccatgcaccaccacccgtaagatcaagagaagtctctagcttgtcaatccttattacgtctggacctggtgagtttccccgtgttgagtcaaattaagccgcaggctccactcctgggtggtgcccttccgtcaattcctttaagtttcagccttgcaaccatactccccccagaacccaaagactttgatttctcgtaaggtgccgagtgggcaagaagcgccacccgatccctagtcggcatagtttatggttaagactacgacggtatctgatcatcttcgatcccctaactttcgttcttgattaatgaaaacgtccttggcaaatgctttcgcagtagttagtcttcagttaatccaagaatttcacctctgacaactgaatactgatgcccccgaccgtccctattaatcattacgatggtcctagaaaccaacaaaatagaaccataacgtcctattctattattccatgctaatatatccgagcaaaggcctgctttgaacactctaatttcctcaaagtaatcgtcctggttcactccgaagagttagccagaaggaaaagacccggccgcaacagtacttaccataggtagaccgcccgcccaggcccaaagttcaactacgagctttttaactgcaacaactttaatatacgctattggagctggaattaccgcggctgctggcaccagacttgccctccaattgttcctcgttaaggtatttacattggtactcattccaattacaagaccaatggccctgtatcgttatatattgtcactacctccctgtgtcaggattgggtaatttgcgcgcctgctgccttccttggatgtggtagccgtttctcaggctccctctccggaatcgaacccttattccccgttacccgtgaaaaccatggtaggcctctatcctaccatcgaaagtttataggcagaaatttgaatgaaccagctccagcacaaaggcatgagcttcgaaaagttattatgaatcatacaaaaggcccgagggcattgattttttatctaataaatacacccctcccgaagtcggggctttacgcatgtattagctctaattttccacggttatccatgtagaacggaactatcaaataaacgataactgatttaatgagccattcgcagtttcagctcgtataaatgccttatacttagacatgcatggcttaatctttgagacaagcatatgactactggcaggatcaccagataactacgctcagatgagttttgttacgttggttggattaacctacacatagcactgtttgactttcttcaacggaggtcccgtgtacaaagtacagcttcgtccgcttcagtggagagtggtccagatgtcacgtttgcacggctacatctccaaccccgtccccaataaacctagtggtgtccgctggctatcagctagcaacgccaccggcccgtcaggtgcgcaccacggtcgcaagaccacatgcccctgtccaagacttgcgtctcttgtccccggccatacccaggcttgtccgtagacgcccctgcatactctccgtgggatcattgcctatcggtgcacaacacaaaccgctaagaaccgcattttttaagtgctttctcattatatcccccggactgcgtaaatcttgccaaacattcgcagcgcgcgttggccgcggcgtccaggagttaaattggacttcgttttggcgtgcaatgttttcgagcgcgaaggtgaagttttcttttgtcattgctgctgagccgtcagccgtgcatgcatttctaacaaatcccaatttgcaaacttgcccaatatgccttcctacaccttcataattacatggcacactatacagagcatcctgatcaacatagtctttgtaactagcaataggacagaaactaggaaaatttgatgtgtgttttccttcactgggcactgccctggaatgtaatactcgcccgacaaaaactttcaaactccccagcgaatttaaaattttgaaaaaattcaaaaactctcacagtctacttccccgaaattcccacttcactgggcaacaatatcaacaccccccgtaactcccctctcaggccggattttccaattccatctcctgttctcctactctccctggcctcttgtacctcctaccactctcagaatcctgaattagtgattttgaaatttctcatattggtttctacccggcagctgcccatgaaaaaatgtctaactgggcaactccccagtgaacaccctcgctgtgccttttctcactttgccaaaatttccagccagtactcacacaatttgcctgcttgcccacgaagggcctctccaatgggcacagctccactggggcactccctgtcaacttgcccatgaaaccacgttctctccagatgaactttggtttggccaatttccattatgcctatgttaaacaatgttcctagagagtaaaacacgctgatcaaaactatctacaaggcatgtctctagctggcgtggttgtcgagatttcactgttgaacttggcacactactaacttcaacgctatttatttctccacaaccagtgcatctttcgctttgataattttattcataataaacaccactggatctccacgttaagcatataatatcgtcaaaaaagaacatactttgttttttattacaccctcccctgttgtacccaaatcacacttttacccttgtaactctccaacacgccaaaatatgcccatgttaaatctttaccactatagttctacgctctctgttgcctatccaactctaaaaagtcaaaaaaaaacaacataaaatatacttctttcaactagtacatccaccaacacagatagtcccagtcaaattcttcacttacctcccatgaaaaaataaaaatcatatttttaccccttcttttgcctccataaaatttacacagatactctgaacaatgcgattccaaacgcactgggtctcgtgtcctcagcacgtctgtagcccagaaaaaaggcctttttcattttgacatccatataccgcccgaaatcgaacctgtcggttgcggccatatctagcagaaagcaccgtttcccgtccgatcaactgtagttaagctgctaagagcctgaccgagtatgtagtggggagaccatatgcgaaaactcagggtgctgcaatctttttttttttcatagtattgttcatagtgtatttcttgtggcgtattgcgtattatttttgcggcgcatttctctcttggaggctcgtcaccttttgcggtggctcatcacttttcaatttttgctccaaatttccgacccaattttgcggaggctcgtcactttcaaaaatttttctaaaatttccgaacccaattttgcgaggctcgtcactttcaccacgcgcgccaaatttccgaacccaaattttcgctgcgccacacgcacccccatgcgccgctactcgctgcaccgccacaccgccaccgcccacatttttccacttttcggtcgagtcgcaaaaaaattattttttctcacgagcccctcgacctttttttcttatcgtacgctgcttgagccgctatcagcgtgctgagcgccgcgccgagccgccacgacacactttcgttgtcttttggttatgtccgttagtcaccttccgtttactatcttcttactccgccagtcattctacaacactacatcataccctacatgcgcacaaaaaatttcaggcttccaccccatacctacactaatgcatacctgctctggttgtccagatataagcgttcaaagtttagtcaaaaattccatattttgacctctaggtgtaaagtaaattactttcttaatatttccaaaaagtgcgttttttactttttagctcttttttcgggtcgttgcgtctctacatactaattttcgtgctacagccgtgcagtgaaaatttttcaccaccatatttccctaatttctgtgcgtcacttgcctctttgggacgttcccagcccttttttccccaaacccctctgtccgcacgtgattctttctccagagtcaactccctctgactcttcttctctttggttctttaatatgactctgtgtcttgacttctacttattcacgtgattgaatcactggagtcatctcacgtgttattgcgctcaccacttcataactaattcagtaatcaagtcttaattaactaagcacaggtctatactaatctccactgtacatcttaagtaatcactacactacgtaatcataagtcttaatctccgcgggccactgtacgtcttatgtaatcactacactacgtaatcataagtcttaatctcctctgacatcatagctattctccttatgtaatcaataatccctaccctaccactctcctcccttacgtaagcataaatcccgtctgacattatttgaaaaaatcctaagtccaaaacaaaatatgcctacccagacgatcgacccaaatccaccacccccgtcctcacgtataccatacaccaagccacggactaggaattaatggcacccaacagcatcgcccaccacccggccacgccggcatccccaaatctcgccgaaatacccagctcgcatctgcaaactgcaacttcgccgccgaagcaacaaatcggacaacagaggcttaatctcagcagatcgtaacaacaaggctactctactgcttacaataccccgttgtacatctaagtcgtatgcaaaggatttatcctcgcgcatcctgacattgccatccgccggcaagcacacgcagcctttccgccacgcgcaccgctgccgacctactacggttctgcgacacaagtgccttattcttatccttctcaaatgtgcgagggcaagtaatcgtcgcgttctagcatggattctgacttagaggcgttcagccattatccagcagatggtagcttcgcggcagtgtctgctcagacagccgcaaaaaccaattatctgaatgaacggttcctctcgtactaagttcaattactattgcgacaacattcatcagtagggtaaaactaacctgtctcacgacggtctaaacccagctcacgttccctattagtgggtgaacaatccaacgcttaccgaattctgcttcggtatgataggaagagccgacatcgaagaatcaaaaagcaatgtcgctatgagcgcttgactgccacaagccagttatccctgtggtaacttttctggcacctctagcctcaaattccgagggactaaaggatcgataggccacactttcatggtttgtattcacactgaaaatcaaaatcaaggggacttttacccttttgttctactggagatttctgttctccatgagtcccccttaggacatctgcgttatcgtttaacagatgtgccgccccagccaaactccccacctgacaatgtcatcaacccggatcggcacacaagatgccttcgcactagaacgtggtcgtcaagaccagctccgcttcattgaataagtaaaaaaacgataaaggtagtggtatttcactggcgccggagctcccacttatgctacaccctctatgtcttttcacaatgtcaaactagagtcaagctcaacagggtcttctttccccgctgattctgccaagcccgttcccttggctgtggtttcgctagatagtagatagggacagtgggaatctcgttaatccattcatgcgcgtcactaattagatgacgaggcatttggctaccttaagagagtcatagttactcccgccgtttacccgcgcttggttgaatttcttcactttgacattcagagcactgggcagaaatcacattgcgtcaacatcactttctgaccatcgcaatgctatgttttaattagacagtcagattccccttgtccgtaccagttctaagttggttgttaaccgtggaggccgcaagcgcaagcgtagctagcagcaccgcccccgaagaagcagcgccagcacgcatggccagcacaggaagcacatccacccaacccttagagccaatccttatcccgaagttacggatctattttgccgacttcccttatctacattattctatcaactagaggctgttaaccttggagacctgctgcggttatgagtacgacttggcgtgaaaactattccttcctgcggattttcaaggaccgtcgcaagcgcaccggacgtcgcaaacaaaggcgacgctcttccagccataagaccccctctccggataaaccaattccagggtgataagctgttaagaagaaaagaaaactcctcccagggctcccgccggcgtctccgcattctgttacgttgccgtgaagaatccacatccaagttccggaattttaaccggattccctttcgatggtggtgcaaagaattgcacacgttgaaacggagcttccccatctcttaggatcgactaacccgcgtccaactgctgttgacgcggaacctttccccacttcagtcttcaaagttctcatttgaatatttgctactaccaccaagatctgcactaggggccgttcgacccaggctcacgcccaaggcttcgtcacaaacccccacgcctgcctactcgccaaggcatcacgccatggcggcaaagtataggtaacacgcttgagcgccatccattttcagggctagttcattcggccggtgagttgttacacactccttagcggattccgacttccatggccaccgtccggctgtctggatgaactaacaccttttgtggtgtctgatgagcgtgcattccggcaccttaactttgcgttcggttcatcccgcatcgccagttctgcttaccaaaaatggcccactaaaagctctgcattcaaacgtccgcgttcaataaagcaacagggacttcttacatatttaaagtttgagaatacgctaaggtcatttcgaccccgagacgtctaatcattcgctttacctcataaaactgatacgagcttctgctatcctgagggaaacttcggcaggaaccagctactagatggttcgattagtctttcgcccctatacccaaattcgacgatcgatttgcacgtcagaaccgctacgagcctccaccagagtttcctctggcttcaccctattcaggcatagttcaccatctttcgggtcccaacagctatgctcttactcaaatccatccgataaacatcaggatcggtcgatcgtgcccgcccccgagagagcggtccgacctacgttcactttcattacgcgtacgggttttacacccaaacactcgcatagacgttagactccttggtccatgtttcaagacgggcggtattgcgccgttgtgccagcatccgagacgaaacgagtccgccgcagccctcggtccccatacgcagcatctacaaaaggctataacactccgaggagccacattccaattgtccttatcctgcaacgaaaaccgatgctggcccaggaaaaacccagagcgccgcccacgagaggcaacgatgcgtaaatcccatgtcgagcccaatacccttccctttcaacaatttcacgtgctgtttcactctcttttcaaagtgcttttcatctttccttcacagtacttgttcgctatcggtctctcgccaatatttagccttagatggaatttaccacccacttagagctgcattcccaaacaactcgactcgtcagaagggcctcacaggtgtcgacatgcacgatacggggctctcaccctcagtggcaccctgttccaagggacttgcacacacgtctaacccgagactccaacctgcaatttacaactcgcacactaggtgagatttcaaatctgagctcttgccgcttcactcgccgctactgaggcaatccctgttggtttcttttcctccgcttattgatatgcttaagttcagcgggtattcctacctgatctgaggtcgagcttagttaaaagttcggcggccaaagcgttccaataatttagttcacttcgtccacgacgttccatttcgaaaaaggcatagcctgttctcaactctgcttgcgcaagaaggaaacgacgctcagacaggcatgccccatggaataccatggggcgcaatgtgcgttcaagaactcgatgattcacgatggctgcaattcacactaggtatcgcatttcgctgcgctcttcatcgatgcgagaaccaagagatccgttgttgaaagttttgttttgttaaaacttagtgactggtattattacaattttaggtgtttggtgcgctcacgcatgtgtataagatataaatcacagtaatgatccttccgcaggttcacctacggaaaccttgttacgacttttacgacctctaaatgaccaagtttgactgaattttcagcgccatgggaaagttgcccctcccgcggcgccaatcttggagcctcactaagccattcaatcggtagtagcgacgggcggtgtgtacaaagggcagggacgtaatcaacgcaagctgatgacttgcgcttactaggaattcctcgttgaagagcaaaaattacaatgctctatccccagcacgacggagtttcacgagattacccggcctctcgaccaaggatatacttgctggctccgtcagtgtagcgcgcgtgcggcccagaacgtctaagggcatcacagacctgttgttgcctcaaacttccatgggtttgaaacccatagtccctctaagaagagcccacgagcagatgctcgcagccctatttagcaggttaaggtctcgtccgttatcgcaattaagcagacaaatcactccaaggactaaaaacggccatgcaccaccacccgtaagatcaagagaagtctctagcttgtcaatccttattacgtctggacctggtgagtttccccgtgttgagtcaaattaagccgcaggctccactcctggtggtgcccttccgtcaattcctttaagtttcagccttgcaaccatactccccccagaacccaaagactttgatttctcgtaaggtgccgagtgggcaagaagcgccacccgatccctagtcggcatagtttatggttaagactacgacggtatctgatcatcttcgatcccctaactttcgttcttgattaatgaaaacgtccttggcaaatgctttcgcagtagttagtcttcagttaatccaagaatttcacctctgacaactgaatactgatgccccgaccgtccctattaatcattacgatggtcctagaaaccaacaaaatagaaccataacgtcctattctattattccatgctaatatatccgagcaaaggcctgctttgaacactctaatttcctcaaagtaatcgtcctggttcactccgaagagttagccagaaggaaaagacccggccgcaacagtacttaccataggtagaccgcccgcccaggcccaaagttcaactacgagctttttaactgcaacaactttaatatacgctattggagctggaattaccgcggctgctggcaccagacttgccctccaattgttcctcgttaaggtatttacattgtactcattccaattacaagaccaatggccctgtatcgttatatattgtcactacctccctgtgtcaggattgggtaatttgcgcgcctgctgccttccttggatgtggtagccgtttctcaggctccctctccggaatcgaacccttattccccgttacccgtgaaaaccatggtaggcctctatcctaccatcgaaagttgatagggcagaaatttgaatgaaccagctccagcacaaaggccatgagcttcgaaaagttattatgaatcatcaaaaggcccgagggcattgattttttatctaataaatacacccctcccgaagtcggggctttacgcatgtattagctctagattttccacggttatccatgtagaacggaactatcaaataaacgataactgatttaatgagccattcgcagtttcaccgtataatgcttatacttagacatgcatggcttaatctttgagacaagcatatgactactggcaggatcaaccagataactacgctcagatgagttttgttatgatgattggattaacctacacatagcactgtttgactttcttcaacggaggtcccctgtacaaagtacagcttcgtccgcttcagtggagagtggtcccagatgtcacgtttgcacggctacatctccaaccccgtccccaataaacctagtggtccgctggctatcagctagcaacccaccggccccgtcagtgcgcaccacggtcgcaagaccacaatgcccctgtccaagacttgcgtctcttgtccccggccatacccaagcttgtccgtagacgcccctgcatactctccgtgggatcttggcctatcggtgcacaacaccgctaagaaccgcattttttaagtgcttttctcatgtatatcccccggactgcgtaatcttgccaaaaattcgcagcgcgcgttggccgcggcgtccaggagttaaattggacttcgttttggcgtgcaatgttttcgagcgcgaggtgaagtttttctttttgtcaatgctgctgagccgtcagccgtgcatgcatttctaacaaatcccattttgcaaacttgcccaatatgccttcctacaccttcataattacatggcacactatacagagcatcctgatcaacatatctttgtaactaagcaataggacagaaactaggaaattttgatgtgtgttttccttcactgggcactgcccatggaatgtaatacttgcccgacaaaaactttcaatcttcccagcgaatctcaaaatttaaaaaaaattcaaaactctcacagtctacttcccacgaaattcccacttcactgggcaacaataccaacaccccccgtaactcccctctcaggccggattttccaattccaatctctgttctctactctccctggcctcttgtacctcctaccactctcagaatcctgacttagtgattttgaaatttctcatattgggtttctacccggcagctgcccatgaaaaaatgtctactgggcaactccccagtgaacaccctcgctgtgcatttttctcactttgccaaaatttccagccaagtactcacacaatttgtctgcttgcccacgaagggcctcttcactgggcacagctccactgggcactcccagtcaacttgcccatgaaaccacttctctccagatgaactttggttttggccaatttccattatgcccatgttaaacactgctcctagagagtaaaacacgctgatcaaaactatctacaaggcatgtctctagctggcgtggttgtcgagatattcactgttgaacttggcactctactaacttcacctatttatttctccacaaccagtgcgtctttcgctttgataattttatttcataataaacaccactggatctccacatcaagcatataatatcatcaaaaagaacatactttgttttttattacaccctccctgttgtacccatatcacactttacccttctaactcctccaatacgctaaaatatgcccatgttaaatctttaccactatattctacgctctctgttgcccatccaactctaaaaagtcaaaaaaaacaacataaaaaatacttcttccaactagtacatccatcaacacacatattcccaatgaaattcttcacttacctcccatgaaaaataaaaaatcatattttcaccccttcttttgcctccataaaatttacacagatactcctgaacaatccgattccaacgcactgggtctcgtgtcctcagcacgtctgtagcccgagaaaaaaggcctttttcattttgacatccataataccgcccgaaatcgaacactgtcggttgcggccatatctagcagaaagcaccgtttcccgtccgatcaactgtagttaagctgctaagagcctgaccgagtagtgtagtgggagaccatatgcgaaactcaggtgctgcaatctttttttttcatagtatttttcatagtagtgtattttcctgtggcgtattgcgtattattttttgcggcgcatttctctcgtggaggctcgtcacttttttacggaggctcatctttttcagaatttctcgccaattttccgaacccaattttgcggaggctcgtcacttttttacggaggctcatctttttcagaatttctcgccaaatttccgaacccaaaattccggaggctcgtcactttcaaaaatttctcaaatttccgaacccaattttgcggaggctcgtcacttttcaccacgcgcgccaattttccgaacccaattttccgctgcgccacaggcaccgcatgcgccactactgcctgcaccgccacccgccaccgccacatttttccacttttcgtcgagtcgaaaaaattgttttttctcacgagcccctcgctttttcttatcgtacgctgctgaggccgctatcagtgtgctgagccgccacgccaagccgccacgacaccgacttcgttgtcttttggttatgtccgttatcaacctctgtttactatcttcttactccgcagtcattctacacactacatatacctcatgcggcacaaaaattcaggcttcacacccataccctacactagtgcatacctgctctggttgtccagatatagcgttcaaaaagttagtcaaaaatcccatattttgacctctaggtgtaaaataaattactttcttaataatttccaaaaaagtgcgtttttttactttttagctctttgtttcggtcgtttgcgtctctacatactaattttcgtgctacagccgtgcagtgaaaatttttcaccaccatatttccctaattttctgtgcgtcacttgcctctttggacgttcccagccctttttttccccaaacccctctgtccgcacgtgattctttctccagagtcaactccctctgactcttcttctctttggttcttaatatactctgtgtcttgacttctacttattcacggtgattgaatcactggagtcatctcacgtgttattgcgctcaccacttcataactaattcagtaatcaagtcttaattaactaagcacaatctacaggtctatactaatctccactgtacatcttaagtaatcactacactacgtatcataagtcttaatctccgcgggccactgtacgtcttatgtaatcactacactacgtaatcataagtcttaatctcctctgacatcatagctattctccttatgtaatcaataatccctaccctaccactcttcctcccttacgtaagcataaatcccgtctgacattatttgaaaaaaatcctaagtccaaaacaggtaaataggcctacccagacatcgacccaaatccaccacccccgtcctcacgtataccatacaccaagccacggactaggaattaatggcacccaacagcatcgcccaccacccggccacgccggcatccccaaatctcgccgaaatacccagctcgcatctgcaaactgcaacttcgccgccgaagcaacaaatcggacaacagagggcttaatctcagcagatcgtaacaacaaggctactctactgcttacaataccccgttgtacatctaagtcgtatgcaaaggatttatcctcgcgcatcctgacattgccatccgccggcaagcacacgcagcctttccgccacgcgcaccgctgccgacactactacggtgctgcgaccacaagtgccttattcttatccttctcaaatgtgcgagggcaagtaatcgtcgcgttctagcatgattctgacttagaggcgttcagccattatccagcagatggtagcttcgcggcagtgtctgctcagacagccgcaaaaccaattatctgaatgaacggttcctctcgtactaagttcaattactattgcgacaacattcatcagtaggggtaaaactaacctgtctcacgacggtctaaaccagctcacgttccctattagtgggtgaacaatccaacgcttaccgaattctgcttcggtatgaataggaagagccgacatcgaagaatcaaaagcaatgtcgctatgagcgcttgactgccacaatgccattatccctgtggttaacttttctggcacctctagcctcaaattccgagggactaaaggatcgataggccacactttcatggtttgtattcacactgaaaatcaaaaatcaaggggacttttaccttttgtttctactggagatttctgttctccatgagtcccccttaggacatctgcgttatcgtttaacagatgtgccgccccagccaaaactcccacctgacaatgtcatcaacccggatcggcacacaagatgccttcgcactagaacgtggtcgtcaagaccagctccgcttcattgaataagtaaaaaaacgataaaggtagtggtatttcactggcgccggagctcccacttatgctacaccctctatgtcttttcacaatgtcaaactagagtcaagctcaacaggggtcttctttccccgctgattctgccaagcccgttcccttggctgtggtttcgctagatagtagatagggacagtggggatctcgttaatccattcatgcgcgtcactaattagatgacgaggcatttgggctaccttaagagagtcatagttactcccgcctgtttacccgcgcttggttgaatttcttcactttgacattcagaagcactggggcagaaatcacattgcgtcaacatcactttctgaccatcgcaatgctatgttttaattagacagtcagattccccttgtccgtaccagttctaagttggttgttaaaccgtggaggccgcaagcgcaagcgtagctagcagcaccgcccccgaagaagcagcgccagcacgcatggccagcacaggaagcacatccacccaccttagagcaatccttatcccgaagttacggatctattttgccgacttcccttatctacattattctatcactagaggctgttaaccttggagacctgctgcggttatgagtacgacttggcgtgaaaactattccttcctgcggattttcaaggaccgtcgcaagcgcaaccggacgtcgcaaaacaaaggcgacgctcttccagccataagaccccctctccggataaaccattccagggtgataagctgttaagaagaaaagaaaactcctcccagggctcccgccggcgtctccgcattctgttacgttgccgtgaagaatccacatccaagttccggaattttaaccggattccctttcgatggtggtgcaaagaattgcacacgttgaaacggagcttccccatctcttaggatcgactaacccgcgtccaactgctgttgacgcggaacctttccccacttcagtcttcaaagttctcatttgaatatttgctactaccaccaagatctgcactaggggccgttcgacccaggctcacgcccaaggcttcgtcacaaacccccacgcctgcctactcgccaaggcatcacgccatggcggcaaagtataggtaacacgcttgagcgccatccattttcagggctagttcattcggccggtgagttgttacacactccttagcggattccgacttccatggccaccgtccggctgtctggatgaactaacaccttttgtggtgtctgatgagcgtgcattccggcaccttaactttgcgttcggttcatcccgcatcgccagttctgcttaccaaaaatggcccactaaaagctctgcattcaaacgtccgcgttcaataaagcaacagggacttcttacatatttaaagtttgagaatacgctaaggtcatttcgaccccgagacgtctaatcattcgctttacctcataaaactgatacgagcttctgctatcctgagggaaacttcggcaggaaccagctactagatggttcgattagtctttcgcccctatacccaaattcgacgatcgatttgcacgtcagaaccgctacgagcctccaccagagtttcctctggcttcaccctattcaggcatagttcaccatctttcgggtcccaacagctatgctcttactcaaatccatccgataaacatcaggatcgtcgattcgtgcccgccccgagagagcggtccgacctacgttcactttcattacgcgtacgggttttacacccaaaacactcgcatagacgtttagactccttggtccatgtttcaagacgggcggtattgcgccgtgtgccagcatccgagacgaaacgagtccgccgcagccctcggtccccatacgcagcatctacaaaaggctataacactccgaggagccacttccaattgtccttatcctgcaacgaaaaccgatgctggcccaggaaaaacccagagcgccgcccacgagaggcaacgatgcgtaaatcccatgtcgagcccaatacccttccctttcaacaatttcacgtgctgtttcactctcttttcaaagtgcttttcatctttccttcacagtactgtgttcgctatcggtctctcgccaatatttagccttagatggaattttaccaacccacttaagctgcattcccaaacaactcgactcgtcagaagggcctccaggtgtcgacatgcacgatacggggctctcaccctcaggtgcacccgttccaagggacttgcacacacgtctaacccgagactccaacctgcatttacaactcgcacactaggtgagatttcaaatctgagctcttgccgcttcaatcgccgctactgaggcaatccctgttggtttcttttcctccgcttattgatatgcttaagttcagcgggtattctacctgatctgaggtcgagcttagttaaaagttcggcggccaaagcgttccaataattttagttcacttcgtccacgacgttccattcgaaaaaggcatagcctgttctcaactctgcttgcgcaagaaggaaacgacgctcagacaggcaatgccccatggaataccatgggcgccaatgtgcgttcaagaactcgatgattcacgatggctgcaattcaacactaggtatcgcatttcgctgcgctcttcatcgatgcgagaaccaagagatccgttgttgaaagttttgtttttgttaaaacttagtgactggtattattacaattttaggtgttggtgcgctcacgcatgtgtataagatataaatcacagtaatgatccttccgcaggttcacctacggaaacctgttacgacttttacgcctctaaatgaccaagtttgactgaattttcagcgccatgggaaagttgcccctcccgcggcgccaatcttggagcctcactaagccattcatcggtagtagcgacgggcggtgtgtacaaagggcagggacgtaatcaacgcaagctgatacttgcgcttactaggaattcctcgttgagagcaaaaattacaatgctctatccccagcacgacggagtttcacgagatttacccgggcctctcgaccaaggatatacttgctggctccgtcagtgtagcgcgcggcggcccagaacgtctaagggcatcacagacctgttgttgcctcaaaacttcaagtgggtttgaaacccatagtccctctaagaagaggcccacgagcagatgctcgcagccctatttagcaggttaaggtctcgtcgttatcgcaattaagcagacaaatcaatccaaggactaaaaacggccatgcaccaccacccgtaagatcaagagaagtctctagcttgtcaatccttattacgtctggacctggtgagtttccccgtgttgagtcaaattaagccgcaggctccactcctggtggtgccttccgtcaattcctttaagtttcagccttgcacaccatactccccccagaacccaaagactttgatttctcgtaaggtgccgagtgggcaagaagcgccaacccgatccctagtcggcatagtttatggttaaagacttacgacggtatctgatcatcttcgatcccctaactttcgtgtctttgattaatgaaaacgtccttggcaaatgctttcgcaagtagttagtcttcagttatccaagaatttcacctctgacaactgaatactgatgcccccgaccgtccctattaatcattacgatggtcctagaaaccaacaaaatagaaccataacgtcctattctattattccatgctaatatatccgagcaaaggcctgctttgaaacactctaatttcctcaaagtaatcggtcctggtttcacatccgaagagttagccagaaggaaaagacccggccgcaacagtacttaccataggtagaccgcccgcccaggcccaaagttccactacgagctttttttaactgcaacaactttaatatacgctattggagctggaattaccgcggctgctggcaccagacttgccctccaatgttcctcgttaaggtatttacattgtactcattccaattacaagaccaatggccctgtatcgttatatattgtcactacctccctgtgtcaggattgggtaatttgcgcgcctgctgccttccttggatgtggtagccgtttctcaggctccctctccggaatcgaacccttattccccgttacccgttgaaaaccatggtaggcctctatcctaccatcgaaagttgatagggcagaaatttgaatgaaccagctccagcacaaaggccatgagcttcgaaaagttattatgaatcatcaaaaggcccgagggcattgattttttatctaataaatacacccctcccgaagtcgggggctttacgcatgtattagctctagattttccacggttatccatgtagaacggaactatcaaataaacgataactgatttaatgagccattcgcagtttcaccgtataatgcttatacttagacatgcatggcttaatctttgagacaagcatatgactactggcaggatccaccagataactacgctcagatgagttttgttatgatgattggattaaacctacacatagcactgtttgactttcttcaacggaggtcccctgtacaaagtacagcttcgtccgcttcagtggagagtggtcccagatgtcacgtttgcacggctacatctccaaccccgtccccaataaacctagtggtccgctggctatcagctagcaacccaccggccccgtcagtgcgcaccacggtcgcaagaccacaatgcccctgtccaagacttgcgtctcttgtccccggccatacccaagcttgtccgtagacgcccctgcatactctccgtgggatcttggcctatcggtgcacaacaccgctaagaaccgcattttttaagtgcttttctcatgtatatcccccggactgcgtaatcttgccaaaaattcgcagcgcgcgttggccgcggcgtccaggagttaaattggacttcgttttggcgtgcaatgttttcgagcgcgaggtgaagtttttctttttgtcaatgctgctgagccgtcagccgtgcatgcatttctaacaaatcccattttgcaaacttgcccaatatgccttcctacaccttcataattacaatggcacactatacagagcatcctgatcaacatatctttgtaactaagcaataggacagaaactaggaaatttgatgtgtgttttccttcactgggcactgcccatggaatgtaatacttgcccgacaaaaactttcaatcttcccagcgaatctcaaaattttaaaaaaattcaaaactctcacagtctacttcccacgaaattcccacttcactgggcaacaataccaacacccccccgtaactcccctctcaggccggattttccaattccaatctctgttctctactctccctggcctcttgtacctcctaccactctcagaatcctgacttagtgattttgaaatttctcatattgggtttctaccggcagctgccatgaaaaaatgtctactgggcaactccccagtgaacaccctcgctgtgcatttttctcatctttgccaaaatttccagccaagtactcacacaatttgtctgcttgcccacgaagggcctcttcactgggcacagctccactgggcactcccagtcaacttgcccatgaaaccacttctctccagatgaactttggtttttggccaatttccattatgcccatgttaaacactgctcctagagagtaaaacacgctgatcaaaactatctacaaggcatgtctctagctggcgtggttgtcgagatattcactgttgaacttggcactctactaacttcacctatttatttctccacaaccagtgcgtctttcgctttgataattttatttcataataaacaccactggatctccacatcaagcatataatatcatcaaaaagaacatactttgttttttattacaccctccctgttgtacccatatcacactttacccttctaactcctccaatacgctaaaatatgcccatgttaaatctttaccactatattctacgctctctgttgcccatccaactctaaaaaagtcaaaaaaaaacaacataaaaatacttcttccaactagtacatccatcaacacacatattcccaatgaaattcttcacttacctcccatgaaaaataaaaaatcatattttcacccttcttttgcctccataaaatttacacagatactcctgaacaatccgattccaacgcactgggtctcgtgtccctcagcacgtctgtagcccgagaaaaaaggccttttcattttgacatccataataccgcccgaaatcgaacactgtcggttgcggccatatctagcagaaagcaccgtttcccgtccgatcaactgtagttaagctgcttaagagcctgaccgagtagtgtagtggggagaccatatgcgaaactcaggtgctgccaatcttttttttttcatagtatttttcatagtagtgtattttcctgtggccgtattggcgtattattttttgcggccgcatttctctcgtggaggctcgtcaccttttttacggaggctcatctttttcagaatttctcgccaattttccgaacccaattttgcggaggctcgtcacttttttacggaggctcatctttttcagaatttctcgccaaatttcgaacccaaaattccggaggctcgtcactttcaaaatttctcaaatttccgaacccaattttgcggaggctcgtcacttttcaccacgcgcgccaattttccgaacccaattttccgctgcgccacaggcaccgcatgcgccactactgcctgcaccgccacccgccaccgccacatttttccacttttcgtcgagtcgaaaaaattgttttttctcacgagcccctcgacttttttcttatcgtacgctgctgagccgctatcagtgtgctgagccgccacgccaagccgccacgacaccactttcgttgtcttttggttatgtccgttatcaccttctgtttactatcttcttactcccgcagtcattctacacactacatatacctacatgcgcacaaaaattcaggcttcacacccataccctacactagtgcatacctgctctggttgtccagatataagcgttcaaagttagtcaaaaatcccatattttgacctctaggtgtaaaataaattactttcttaataatttccaaaaagtgcgttttttactttttagctcttttttcggtcgttgcgtctctacatactaattttcgtgctacagccgtgcagtgaaaatttttcaccaccatatttccctaatttctgtgcgtcacttgcctctttgggacgttcccagcccttttttccccaaacccctctgtccgcacgtgattctttctccagagtcaactccctctgactcttcttctctttggttctttaatatgactctgtgtcttgacttctacttattcacgtgattgaatcactggagtcatctcacgtgttattgcgctcaccacttcataactaattcagtaatcaagtcttaattaactaagcacaagtctacaggtctatactaatctccactgtacatcttaagtaatcactacactacgtaatcataagtcttaatctccgcgggccactgtacgtcttatgtaatcactacactacgtaatcataagtctaatctcctctgacatcatagctattctccttatgtaatcaataatccctaccctaccactctcctcccttacgtaagcataaatcccgtctgacattatttgaaaaaatcctaagtccaaaacaggtaaaatatgcctacccagacgatcgacccaaatccaccacccccgtcctcacgtataccatacaccaagccacggactaggaattaatggcacccaacagcatcgcccaccacccggccacgccggcatccccaaatctcgccgaaatacccagctcgcatctgcaaactgcaacttcgccgccgaagcaacaaatcggacaacagaggcttaatctcagcagatcgtaacaacaaggctactctactgcttacaataccccgttgtacatctaagtcgtatgcaaaggatttatcctcgcgcatcctgacattgccatccgccggcaagcacacgcagcctttccgccacgcgcaccgctgccgacctactacggttctgcgacacaagtgccttattcttatccttctcaaatgtgcgagggcaagtaatcgtcgcgttctagcatggattctgacttagaggcgttcagccattatccagcagatggtagcttcgcggcagtgtctgctcagacagccgcaaaaaccaattatctgaatgaacggttcctctcgtactaagttcaattactattgcgacaacattcatcagtagggtaaaactaacctgtctcacgacggtctaaacccagctcacgttccctattagtgggtgaacaatccaacgcttaccgaattctgcttcggtatgataggaagagccgacatcgaagaatcaaaaagcaatgtcgctatgagcgcttgactgccacaagccagttatccctgtggtaacttttctggcacctctagcctcaaaattccgagggactaaaggatcgataggccacactttcatggtttgtattcacactgaaaatcaaaatcaaggggccttttacccttttgtttctactggagatttctgttctccatgagtcccccttaggacatctgcggttatcgtttaacagatgtgccgccccagcccaaactccccacctggacaatgtcatcaacccggatcggcacacaagatgccttcgcactagaacgtggtcgtcaagaccagctccgcttcattgaataagtaaaaaacgataaaggtagtggtatttcactggcgccggagctcccacttatgctacaaccctctatgtcttttcacaatgtcaaactagaagtcaagctcaacagggtcttctttccccgctgattctgccaagcccgttcccttggctgtggttctcgctagatagtagatagggacagtgggaatctcgttaatccattcatgcgcgtcactaattagatggacgaggcatttggctaccttaagagagtcatagttactcccgccgtttacccgcgcttggttgaatttcttcactttgacattcagagcactgggcaagaaatcacattgcgtcaacatcactttctgaccatcgcaatgctatgttttaattagacagtcagattccccttgtccgtaccagtttctaagttggttgttaaccgtggaggccgcaagcgcaagcgtagctagcagcaccgcccccgaagaagcagcgccagcacgcatggccagcacaggaagcacatccacccaacccttagagccaatccttatcccgaagttacggatctattttgccgacttcccttatctacattattctatcaactagaggctgttaaccttggagacctgctgcggttatgagtacgacttggcgtgaaaactattccttcctgcggattttcaaggaccgtcgcaagcgcaccggacgtcgcaaacaaaggcgacgctcttccagccataagaccccctctccggataaaccaattccagggtgataagctgttaagaagaaaagaaaactcctcccagggctcccgccggcgtcctccgcattctgttaccgttgccgtgaagaatccacatcccaagttccggaattttaaccggattccctttcgatggtggtgcaaagaattgcacacgtgaaacggagcttccccatctcttaggatcgactaacccgcgtccaactgctgttgacgcggaacctttccccacttcagtcttcaaagttctcatttgaatatttgctactaccaccaagatctgcactaggggccgttcgacccaggctcacgcccaaggcttcgtcacaaacccccacgcctgcctactcgccaaggcatcacgccatggcggcaaagtataggtaacacgcttgagcgccatccattttcagggctagttcattcggccggtgagttgttacacactccttagcggattccgacttccatggccaccgtccggctgtctggatgaactaacaccttttgtggtgtctgatgagcgtgcattccggcaccttaactttgcgttcggttcatcccgcatcgccagttctgcttaccaaaaatggcccactaaaagctctgcattcaaacggtccgcgttcaataaagcaacagggacttcttacatatttaaagtttgagaatacgctaaggtcatttcgaccccgagacgtctaatcattcgctttacctcataaaactgatacgagcttctgctatcctgagggaaacttcggcaggaaccagctactagatggttcgattagtctttcgcccctatacccaaattcgacgatcgatttgcacgtcagaaccgctacgagcctccaccagagtttcctctggcttcaccctattcaggcatagttcaccatctttcgggtcccaacagctatgctcttactcaaatccatccgataaacatcaggatcggtcgatcgtgcccgcccccgagagagcggtccgacctacgttcactttcattacgcgtacgggttttacacccaaacactcgcatagacgttagactccttggtccatgtttcaagacgggctggtattgcgccgttgtgccagcatccgagacgaaaacgagtccgccgcagccctcggtccccatacgcagcatctacaaaaggctataacactccgaggagccacattccaattgtccttatcctgcaacgaaaaccgatgctggcccaggaaaaacccagagcgccgcccacgagaggcaacgatgcgtaaatcccatgtcgagcccaatacccttccctttcaacaatttcacgtgctgtttcactctcttttcaaagtgcttttcatctttccttcacagtacttgttcgctatcggtctctcgccaatatttagccttagatggaatttaccacccacttagagctgcattcccaaacaactcgactcgtcagaagggcctccacaggtgtcgacatgcacgatacggggctctcaccctcagtggcaccctgttccaagggacttgcacacacgtctaaccgagactccaacctgcaatttacaactcgcacactaggtgagattcaaatctgagctcttgccgctttcactcgcgctactgaggcaatccctgtggtttcttttcctccgcttatgatatgcttaagttcagcgggtattcctaccgatctgaggtcgagattagttaaaagttcggcggccaaagcgttccaataattagttcacttcgtccaacgacgttccatttcgaaaaaggcatagcctgtctcaactctgctgcgcaagaaggaaacgacgctcaggacaggcatgccccatgaataccatggggcgcactgtgcgttcaagaactcgatgattcacgatggctgcaattcacaccttagtatcgcattttcgctgcgctcttcatcgatgcgagaaccaagagattccgttgttgaaagttttgttttgttaaaacttagtggactggtattattacaattttaggtgtttggtgcgctcacgcatgtgtataagatataaatccacagtaatgatcctttccgcaggttcacctacggaaaccttgttacgacttttacgacctctaaatgaccaagtttgactgaattttcagcgccatgggaaagttgcccctcccgcggcgccaatcttggagcctcactaagccattcaatcggtagtagcgacgggcggtgtgtacaaagggcagggacgtaatcaacgcaagctgatgacttgcgcttactaggaattcctcgttgaagagcaaaaattacaatgctctatccccagcacgacggagtttcacgagattacccgggcctctcgaccaaggatatacttgctggctccgtcagtgtagcgcgcgtggcggcccagaacgtctcaagggcatcacagacctgttgttgcctcaaacttccatgggtttgaaacccatagtccctctaagaagagcccacgagcagatgctcgcagccctatgtagcaggttaaggtctcgtccgttatcgcaattaagcagacaaatcactccaaggactaaaaacggccatgcaccaccacccgtaagatcaagagaagtctctagcttgtcaatccttattacgtcctggacctggtgaggtttccccgtgttgagtcaaatttaagccgcaggctccactcctgtggtgcccttccgtcaattcctttaagtttcagcctgctgcaaccatactccccccagaaccccaaagactttgatttctcgtaaggtgccgagtgggcaagaagcgccccacccgatccctagtcggcatagtttatggttaagactacgacggtatctgatcatcttcgatcccctagactttcgttcttgattaatgaaaacgtccttggcaaatgctttcgctagttagttagtccttcagttaatccaagaatttcacctctgacaactgaatactgatgccccccgaccgtcccctattaatcattacgatggtcctagaaaccaacaaaatagaaccataacgtcctattctattattccatgctaatatatccgagcaaaggcctgctttgaaccactctaatttcctcaaatgtaatcgtcctggttacactccgagagttagcagaaggaaagaacccggccgcaacagtacttaccataggtacgaccgcccgcccaggtccatgagttcaactacgagctttttaactgcaacaactttaatatacgctattggagctggaattaccgcggctgctggcaccagacttgccctccaattgttcctcgttaaggtattttacattgtacctcattccaattacaagaccaatggccctgtatcgttatatattgtcactacctccctgtgtcaggattggtatttgcgcgcctgctgccttctttggatgtggtagccgtttctcaggctccctctccggaatcgaacccttattcccccgttacccgtgaaaaccatggtaggcctctatcctaccatcgaaagttgatagggcagaaaatttgaatgaacagctccagcacaaaggccatgagcttctgcaaaagttattatgaatcatcaaaaggacccgagggcattgatttttttatctaataaatacacccccctccgaagtcggggctcttacgcatgtattagctctagattttccacggttattccatgtagaacggaactatcataataacacgataaactgatttaatgagccattcgcagtttcaccgtataatgcttatacttagacatgcatggcttaatctttgagacaagcatatgactactggcaggatcaccagataactacgctcagatgattttgttatgatgattggattaacctacacatagcactgtttgactttcttcaacggaggtcccctgtacaaagtacagcttcgtccgcttcagtggagagtggtcccagatgtcacgtttgcacggctacatctccaaccccgtccccaataaacctagtggtccgctggctatcagctagcaacccaccggccccgtcagtgcgcaccacggtcgcaagaccacaatgcccctgtccaagacttgcgtctcttgtccccggccatacccaagcttgtccgtagacgcccctgcatactctccgtgggatcttggcctatcggtgcacaacaccgctaagaaccgcattttttaagtgcttttctcatgtatatcccccggactgcgtaatcttgccaaaaattcgcagcgcgcgttggccgcggcgtccaggagttaaattggacttcgttttggcgtgcaatgttttcgagcgcgaggtgaagtttttctttttgtcaatgctgctgagccgtcagccgtgcatgcatttctaacaaatcccattttgcaaacttgcccaatatgccttcctacaccttcataattacatggcacactatacagagcatcctgatcaacatatctttgtaactaagcaataggacagaaactaggaaattttgatgtgtgttttccttcactgggcactgcccatggaatgtaatacttgcccgacaaaaactttcaatcttcccagcgaatctcaaaatttaaaaaaaattcaaaactctcacagtctacttcccacgaaattcccacttcactgggcaacaataccaacaccccccgtaactcccctctcaggccggattttccaattccaatctctgttctctactctccctggcctcttgtacctcctaccactctcagaatcctgacttagtgattttgaaatttctcatattgggtttctacccggcagctgcccatgaaaaaatgtctactgggcaactccccagtgaacaccctcgctgtgcatttttctcactttgccaaaatttccagccaagtactcacacaatttgtctgcttgcccacgaagggcctcttcactgggcacagctccactgggcactcccagtcaacttgcccatgaaaccacttctctccagatgaactttggttttggccaatttccattatgcccatgttaaacactgctcctagagagtaaaacacgctgatcaaaactatctacaaggcatgtctctagctggcgtggttgtcgagatattcactgttgaacttggcactctactaacttcacctatttatttctccacaaccagtgcgtctttcgctttgataattttatttcataataaacaccactggatctccacatcaagcatataatatcatcaaaaagaacatactttgttttttattacaccctccctgttgtacccatatcacactttacccttctaactcctccaatacgctaaaatatgcccatgttaaatctttaccactatattctacgctctctgttgcccatccaactctaaaaagtcaaaaaaaacaacataaaaaatacttcttccaactagtacatccatcaacacacatattcccaatgaaattcttcacttacctcccatgaaaaataaaaaatcatattttcaccccttcttttgcctccataaaatttacacagatactcctgaacaatccgattccaacgcactgggtctcgtgtcctcagcacgtctgtagcccgagaaaaaaggcctttttcattttgacatccataataccgcccgaaatcgaacactgtcggttgcggccatatctagcagaaagcaccgtttcccgtccgatcaactgtagttaagctgctaagagcctgaccgagtagtgtagtgggagaccatatgcgaaactcaggtgctgcaatctttttttttcatagtatttttcatagtagtgtattttcctgtggcgtattgcgtattattttttgcggcgcatttctctcgtggaggctcgtcacttttttacggaggctcatctttttcagaatttctcgccaattttccgaacccaattttgcggaggctcgtcacttttttacggaggctcatctttttcagaatttctcgccaaatttccgaacccaaaattccggaggctcgtcactttcaaaaatttctcaaatttccgaacccaattttgcggaggctcgtcacttttcaccacgcgcgccaattttccgaacccaattttccgctgcgccacaggcaccgcatgcgccactactgcctgcaccgccacccgccaccgccacatttttccacttttcgtcgagtcgaaaaaattgttttttctcacgagcccctcgacttttttcttatcgtacgctgctgagccgctatcagtgtgctgagccgccacgccaagccgccacgacaccactttcgttgtcttttggttatgtccgttatcaccttctgtttactatcttcttactcccgcagtcattctacacactacatatacctacatgcgcacaaaaattcaggcttcacacccataccctacactagtgcatacctgctctggttgtccagatataagcgttcaaagttagtcaaaaatcccatattttgacctctaggtgtaaaataaattactttcttaataatttccaaaaagtgcgttttttactttttagctcttttttcgggtcgttgcgtctctacatactaattttcgtgctacagccgtgcagtgaaaatttttcaccaccatatttccctaatttctgtgcgtcacttgcctctttgggacgttcccagcccttttttccccaaacccctctgtccgcacgtgattctttctccagagtcaactccctctgactcttcttctctttggttctttaatatgactctgtgtcttgacttctacttattcacgtgattgaatcactggagtcatctcacgtgttattgcgctcaccacttcataactaattcagtaatcaagtcttaattaactaagcacaagtctacaggtctatactaatctccactgtacatcttaagtaatcactacactacgtaatcataagtcttaatctccgcgggccactgtacgtcttatgtaatcactacactacgtaatcataagtcttaatctcctctgacatcatagctattctccttatgtaatcaataatccctaccctaccactctcctcccttacgtaagcataaatcccgtctgacattatttgaaaaaatcctaagtccaaaacaggtaaaatatgcctacccagacgatcgacccaaatccaccacccccgtcctcacgtataccatacaccaagccacggactaggaattaatggcacccaacagcatcgcccaccacccggccacgccggcatccccaaatctcgccgaaatacccagctcgcatctgcaaactgcaacttcgccgccgaagcaacaaatcggacaacagaggcttaatctcagcagatcgtaacaacaaggctactctactgcttacaataccccgttgtacatctaagtcgtatgcaaaggatttatcctctgcgcatcctgacattgccatcccgccgcaagcacacgcagcctttccgccacggcgcaccgctgccgacctactacggtttctgcgacacaagtgccttattcttatccttctcaaatgtgcgagggcaagtaatcgtcgcgttctagcatggattctgacttagaggcgttcagccattatccagcagattggtagcttcgcggcagtgttctgctcagacgccgcaaaaacccattatctgaatgaacggttcctctcgtactaagttcaattactattgcgacaacattcatcagtagggtaaaactaacctgtctcacgacggtctaaacccagctcacgttccctatttagtgggtgaacaatccaacgcttaccgaattgctgcttcggtattgataggaatgaggccgacatcgaagaatcaaaaagcaatgtccgctatgagcgctgactgccacaagccagttatccctgtggtaacttttctggcacctctaggcctcaaattccgagggactaaaggatcgataggccacactttcatgcgtttgtattcacactgaaaatcaaaatcaaggggggactttttacctttgttgttctactgagatttctgttctccatgagtcccccttaggacatctgcgttatcgtttaacagatgtgccgccccagccaaactccccacctgacaatgtcatcaacccggatcggcacacaagatgccttcgcactagaacgtggtcgtcaagaccagctccgcttcattgaataagtaaaaaaacgataaaggtagtggtatttcactggcgccggagctcccacttatgctacaccctctatgtcttttcacaatgtcaaactagagtcaagctcaacagggtcttctttccccgctgattctgccaagcccgttcccttggctgtggtttcgctagatagtagatagggacagtgggaatctcgttaatccattcatgcgcgtcactaattagatgacgaggcatttggctaccttaagagagtcatagttactcccgccgtttacccgcgcttggttgaatttcttcactttgacattcagagcactgggcagaaatcacattgcgtcaacatcactttctgaccatcgcaatgctatgttttaattagacagtcagattccccttgtccgtaccagttctaagttggttgttaaccgtggaggccgcaagcgcaagcgtagctagcagcaccgcccccgaagaagcagcgccagcacgcatggccagcacaggaagcacatccacccaacccttagagccaatccttatcccgaagttacggatctattttgccgacttcccttatctacattattctatcaactagaggctgttaaccttggagacctgctgcggttatgagtacgacttggcgtgaaaactattccttcctgcggattttcaaggaccgtcgcaagcgcaccggacgtcgcaaacaaaggcgacgctcttccagccataagaccccctctccggataaaccaattccagggtgataagctgttaagaagaaaagaaaactcctcccagggctcccgccggcgtctccgcattctgttacgttgccgtgaagaatccacatccaagttccggaattttaaccggattccctttcgatggtggtgcaaagaattgcacacgttgaaacggagcttccccatctcttaggatcgactaacccgcgtccaactgctgttgacgcggaacctttccccacttcagtcttcaaagttctcatttgaatatttgctactaccaccaagatctgcactaggggccgttcgacccaggctcacgcccaaggcttcgtcacaaacccccacgcctgcctactcgccaaggcatcacgccatggcggcaaagtataggtaacacgcttgagcgccatccattttcagggctagttcattcggccggtgagttgttacacactccttagcggattccgacttccatggccaccgtccggctgtctggatgaactaacaccttttgtggtgtctgatgagcgtgcattccggcaccttaactttgcgttcggttcatcccgcatcgccagttctgcttaccaaaaatggcccactaaaagctctgcattcaaacgtccgcgttcaataaagcaacagggacttcttacatatttaaagtttgagaatacgctaaggtcatttcgaccccgagacgtctaatcattcgctttacctcataaaactgatacgagcttctgctatcctgagggaaacttcggcaggaaccagctactagatggttcgattagtctttcgcccctatacccaaattcgacgatcgatttgcacgtcagaaccgctacgagcctccaccagagtttcctctggcttcaccctattcaggcatagttcaccatctttcgggtcccaacagctatgctcttactcaaatccatccgataaacatcaggatcggtcgatcgtgcccgcccccgagagagcggtccgacctacgttcactttcattacgcgtacgggttttacacccaaacactcgcatagacgttagactccttggtccatgtttcaagacgggcggtattgcgccgttgtgccagcatccgagacgaaacgagtccgccgcagccctcggtccccatacgcagcatctacaaaaggctataacactccgaggagccacattccaattgtccttatcctgcaacgaaaaccgatgctggcccaggaaaaacccagagcgccgcccacgagaggcaacgatgcgtaaatcccatgtcgagcccaatacccttccctttcaacaatttcacgtgctgtttcactctcttttcaaagtgcttttcatctttccttcacagtacttgttcgctatcggtctctcgccaatatttagccttagatggaatttaccacccacttagagctgcattcccaaacaactcgactcgtcagaagggcctcacaggtgtcgacatgcacgatacggggctctcaccctcagtggcaccctgttccaagggacttgcacacacgtctaacccgagactccaacctgcaatttacaactcgcacactaggtgagatttcaaatctgagctcttgccgcttcactcgccgctactgaggcaatccctgttggtttcttttcctccgcttattgatatgcttaagttcagcgggtattcctacctgatctgaggtcgagcttagttaaaagttcggcggccaaagcgttccaataatttagttcacttcgtccacgacgttccatttcgaaaaaggcatagcctgttctcaactctgcttgcgcaagaaggaaacgacgctcagacaggcatgccccatggaataccatggggcgcaatgtgcgttcaagaactcgatgattcacgatggctgcaattcacactaggtatcgcatttcgctgcgctcttcatcgatgcgagaaccaagagatccgttgttgaaagttttgttttgttaaaacttagtgactggtattattacaattttaggtgtttggtgcgctcacgcatgtgtataagatataaatcacagtaatgatccttccgcaggttcacctacggaaaccttgttacgacttttacgacctctaaatgaccaagtttgactgaattttcagcgccatgggaaagttgcccctcccgcggcgccaatcttggagcctcactaagccattcaatcggtagtagcgacgggcggtgtgtacaaagggcagggacgtaatcaacgcaagctgatgacttgcgcttactaggaattcctcgttgaagagcaaaaattacaatgctctatccccagcacgacggagtttcacgagattacccgggcctctcgaccaaggatatacttgctggctccgtcagtgtagcgcgcgtgcggcccagaacgtctaagggcatcacagacctgttgttgcctcaaacttccatgggtttgaaacccatagtccctctaagaagagcccacgagcagatgctcgcagccctatttagcaggttaaggtctcgtccgttatcgcaattaagcagacaaatcactccaaggactaaaaacggccatgcaccaccacccgtaagatcaagagaagtctctagcttgtcaatccttattacgtctggacctggtgagtttccccgtgttgagtcaaattaagccgcaggctccactcctggtggtgcccttccgtcaattcctttaagtttcagccttgcaaccatactccccccagaacccaaagactttgatttctcgtaaggtgccgagtgggcaagaagcgccacccgatccctagtcggcatagtttatggttaagactacgacggtatctgatcatcttcgatcccctaactttcgttcttgattaatgaaaacgtccttggcaaatgctttcgcagtagttagtcttcagttaatccaagaatttcacctctgacaactgaatactgatgcccccgaccgtccctattaatcattacgatggtcctagaaaccaacaaaatagaaccataacgtcctattctattattccatgctaatatatccgagcaaaggcctgctttgaacactctaatttcctcaaagtaatcgtcctggttcactccgaagagttagccagaaggaaaagacccggccgcaacagtacttaccataggtagaccgcccgcccaggcccaaagttcaactacgagctttttaactgcaacaactttaatatacgctattggagctggaattaccgcggctgctggcaccagacttgccctccaattgttcctcgttaaggtatttacattgtactcattccaattacaagaccaatggccctgtatcgttatatattgtcactacctccctgtgtcaggattgggtaatttgcgcgcctgctgccttccttggatgtggtagccgtttctcaggctccctctccgaatcgaacccttattccccgttacccgtgaaaaccatggtaggcctctatcctaccatcgaaagttgatagggcagaaatttgaatgaaccagctccagcacaaaggccatgagcttcgaaaagttattatgaatcatcaaaaggcccgagggcattgattttttatctaataaatacacccctcccgaagtcggggctttacgcatgtattagctctagattttccacggttatccatgtagaacggaactatcaaataaacgataactgatttaatgagccattcgcagtttcaccgtataatgcttatacttagacatgcatggcttaatctttgagacaagcatatgactactggcaggatcaaccagataactacgctcagatgagttttgttatgatgattggattaacctacacatagcactgtttgactttcttcaacggaggtcccctgtacaaagtacagcttcgtccgcttcagtggagagtggtcccagatgtcacgtttgcacggctacatctccaaccccgtccccaataaacctagtggtccgctggctatcagctagcaacccaccggccccgtcagtgcgcaccacggtcgcaagaccacaatgcccctgtccaagacttgcgtctcttgtccccggccatacccaagcttgtccgtagacgcccctgcatactctccgtgggatcttggcctatcggtgcacaacaccgctaagaaccgcattttttaagtgcttttctcatgtatatcccccgactgcgtaatcttgccaaaaattcgcagcgcgcgttggccgcggcgtccaggagttaaattggacttcgttttggcgtgcaatgttttcgagcgcgaggtgaagtttttctttttgtcaatgctgctgagccgtcagccgtgcatgcatttctaacaaatcccattttgcaaacttgcccaatatgccttcctacaccttcataattacatggcacactatacagagcatcctgatcaacatatctttgtaactaagcaataggacagaaactaggaaattttgatgtgtgttttccttcactgggcactgcccatggaatgtaatacttgcccgacaaaaactttcaatcttcccagcgaatctcaaaatttaaaaaaaattcaaaactctcacagtctacttcccacgaaattcccacttcactgggcaacaataccaacaccccccgtaactcccctctcaggccggattttccaattccaatctctgttctctactctccctggcctcttgtacctcctaccactctcagaatcctgacttagtgattttgaaatttctcatattgggtttctacccggcagctgcccatgaaaaaatgtctactgggcaactccccagtgaacaccctcgctgtgcatttttctcactttgccaaaatttccagccaagtactcacacaatttgtctgcttgcccacgaagggcctcttcactgggcacagctccactgggcactcccagtcaacttgcccatgaaaccacttctctccagatgaactttggttttggccaatttccattatgcccatgttaaacactgctcctagagagtaaaacacgctgatcaaaactatctacaaggcatgtctctagctggcgtggttgtcgagatattcactgttgaacttggcactctactaacttcacctatttatttctccacaaccagtgcgtctttcgctttgataattttatttcataataaacaccactggatctccacatcaagcatataatatcatcaaaaagaacatactttgttttttattacaccctccctgttgtacccatatcacactttacccttctaactcctccaatacgctaaaatatgcccatgttaaatctttaccactatattctacgctctctgttgcccatccaactctaaaaagtcaaaaaaaacaacataaaaaatacttcttccaactagtacatccatcaacacacatattcccaatgaaattcttcacttacctcccatgaaaaataaaaaatcatattttcaccccttcttttgcctccataaaatttacacagatactcctgaacaatccgattccaacgcactgggtctcgtgtcctcagcacgtctgtagcccgagaaaaaaggcctttttcattttgacatccataataccgcccgaaatcgaacactgtcggttgcggccatatctagcagaaagcaccgtttcccgtccgatcaactgtagttaagctgctaagagcctgaccgagtagtgtagtgggagaccatatgcgaaactcaggtgctgcaatctttttttttcatagtatttttcatagtagtgtattttcctgtggcgtattgcgtattattttttgcggcgcatttctctcgtggaggctcgtcacttttttacggaggctcatctttttcagaatttctcgccaattttccgaacccaattttgcggaggctcgtcacttttttacggaggctcatctttttcagaatttctcgccaaatttccgaacccaaaattccggaggctcgtcactttcaaaaatttctcaaatttccgaacccaattttgcggaggctcgtcacttttcaccacgcgcgccaattttccgaacccaattttccgctgcgccacaggcaccgcatgcgccactactgcctgcaccgccacccgccaccgccacatttttcacttttcgtcgagtcgaaaaaattgttttttctcacgagcccctcgacttttttcttatcgtacgctgctgagccgctatcagtgtgctgagccgccacgccaagccgccacgacaccactttcgttgtcttttggttatgtccgttatcaccttctgtttactatcttcttactcccgcagtcattctacacactacatatacctacatgcgcacaaaaattcaggcttcacacccataccctacactagtgcatacctgctctggttgtccagatataagcgttcaaagttagtcaaaaatcccatattttgacctctaggtgtaaaataaattactttcttaataatttccaaaaagtgcgttttttactttttagctcttttttcgggtcgttgcgtctctacatactaattttcgtgctacagccgtgcagtgaaaatttttcaccaccatatttccctaatttctgtgcgtcacttgcctctttgggacgttcccagcccttttttccccaaacccctctgtccgcacgtgattctttctccagagtcaactccctctgactcttcttctctttggttctttaatatgactctgtgtcttgacttctacttattcacgtgattgaatcactggagtcatctcacgtgttattgcgctcaccacttcataactaattcagtaatcaagtcttaattaactaagcacaagtctacaggtctatactaatctccactgtacatcttaagtaatcactacactacgtaatcataagtcttaatctccgcgggccactgtacgtcttatgtaatcactacactacgtaatcataagtcttaatctcctctgacatcatagctattctccttatgtaatcaataatccctaccctaccactctcctcccttacgtaagcataaatcccgtctgacattatttgaaaaaatcctaagtccaaaacaggtaaaatatgcctacccagacgatcgacccaaatccaccacccccgtcctcacgtataccatacaccaagccacggactaggaattaatggcacccaacagcatcgcccaccacccggccacgccggcatccccaaatctcgccgaaatacccagctcgcatctgcaaactgcaacttcgccgccgaagcaacaaatcggacaacagaggcttaatctcagcagatcgtaacaacaaggctactctactgcttacaataccccgttgtacatctaagtcgtatgcaaaggatttatcctcgcgcatcctgacattgccatccgccggcaagcacacgcagcctttccgccacgcgcaccgctgccgacctactacggttctgcgacacaagtgccttattcttatccttctcaaatgtgcgagggcaagtaatcgtcgcgttctagcatggattctgacttagaggcgttcagccattatccagcagatggtagcttcgcggcagtgtctgctcagacagccgcaaaaaccaattatctgaatgaacggttcctctcgtactaagttcaattactattgcgacaacattcatcagtagggtaaaactaacctgtctcacgacggtctaaacccagctcacgttccctattagtgggtgaacaatccaacgcttaccgaattctgcttcggtatgataggaagagccgacatcgaagaatcaaaaagcaatgtcgctatgagcgcttgactgccacaagccagttatccctgtggtaacttttctggcacctctagcctcaaattccgagggactaaaggatcgataggccacactttcatggtttgtattcacactgaaaatcaaaatcaaggggacttttacccttttgttctactggagatttctgttctccatgagtcccccttaggacatctgcgttatcgtttaacagatgtgccgccccagccaaactccccacctgacaatgtcatcaacccggatcggcacacaagatgccttcgcactagaacgtggtcgtcaagaccagctccgcttcattgaataagtaaaaaaacgataaaggtagtggtatttcactggcgccggagctcccacttatgctacaccctctatgtcttttcacaatgtcaaactagagtcaagctcaacagggtcttctttccccgctgattctgccaagcccgttcccttggctgtggtttcgctagatagtagatagggacagtgggaatctcgttaatccattcatgcgcgtcactaattagatgacgaggcatttggctaccttaagagagtcatagttactcccgccgtttacccgcgcttggttgaatttcttcactttgacattcagagcactgggcagaaatcacattgcgtcaacatcactttctgaccatcgcaatgctatgttttaattagacagtcagattccccttgtccgtaccagttctaagttggttgttaaccgtggaggccgcaagcgcaagcgtagctagcagcaccgcccccgaagaagcagcgccagcacgcatggccagcacaggaagcacatccacccaacccttagagccaatccttatcccgaagttacggatctattttgccgacttcccttatctacattattctatcaactagaggctgttaaccttggagacctgctgcggttatgagtacgacttggcgtgaaaactattccttcctgcggattttcaaggaccgtcgcaagcgcaccggacgtcgcaaacaaaggcgacgctcttccagccataagaccccctctccggataaaccaattccagggtgataagctgttaagaagaaaagaaaactcctcccagggctcccgccggcgtctccgcattctgttacgttgccgtgaagaatccacatccaagttccggaattttaaccggattccctttcgatggtggtgcaaagaattgcacacgttgaaacggagcttccccatctcttaggatcgactaacccgcgtccaactgctgttgacgcggaacctttccccacttcagtcttcaaagttctcatttgaatatttgctactaccaccaagatctgcactaggggccgttcgacccaggctcacgcccaaggcttcgtcacaaacccccacgcctgcctactcgccaaggcatcacgccatggcggcaaagtataggtaacacgcttgagcgccatccattttcagggctagttcattcggccggtgagttgttacacactccttagcggattccgacttccatggccaccgtccggctgtctggatgaactaacaccttttgtggtgtctgatgagcgtgcattccggcaccttaactttgcgttcggttcatcccgcatcgccagttctgcttaccaaaaatggcccactaaaagctctgcattcaaacgtccgcgttcaataaagcaacagggacttcttacatatttaaagtttgagaatacgctaaggtcatttcgaccccgagacgtctaatcattcgctttacctcataaaactgatacgagcttctgctatcctgagggaaacttcggcaggaaccagctactagatggttcgattagtctttcgcccctatacccaaattcgacgatcgatttgcacgtcagaaccgctacgagcctccaccagagtttcctctggcttcaccctattcaggcatagttcaccatctttcgggtcccaacagctatgctcttactcaaatccatccgataaacatcaggatcggtcgatcgtgcccgcccccgagagaagcggtccgacctacgttcactttcattacgcgtacgggttttacacccaaacacgcgcatagagacgttagaactccttggtccatgttcagacgggcggtattgcgccgtttgtgccagcatccgagacgaaacgagtccgccgcagccctcggtcccccatacgcagcatctacaaaagctataacactccgaggagcccattccaattgtccttatcctgcaacgaaaaccgatgctggcccaggaaaacccagagcgccgcccacgagaggcaacgatgcgtaaatcccatgtcgagcccaattacccttcttcactttcaacaatttcacgtgctgtttcactctcttttcaaagtgcttttcatctttccttcacagtaacttgttcgctatcggtctctcgccaatatttagccttagattggaatttaccacccacttagagctgcattcccaaacaactcgactcgtcagaagggcctcacaggtgtcgacatgcacgatacggggctctcaccctcagtggcaccctgttccaagggacttgcacacacgtctaacccgagactccaacctgcaatttacaactcgcacactaggtgagatttcaaatctgagctcttgccgcttcactcgccgctactgaggcaatccctgttggtttcttttcctccgcttattgatatgcttaagttcagcgggtattcctacctgatctgaggtcgagcttagttaaaagttcggcggccaaagcgttccaataatttagttcacttcgtccacgacgttccatttcgaaaaaggcatagcctgttctcaactctgcttgcgcaagaaggaaacgacgctcagacaggcatgccccatggaataccatggggcgcaatgtgcgttcaagaactcgatgattcacgatggctgcaattcacactaggtatcgcatttcgctgcgctcttcatcgatgcgagaaccaagagatccgttgttgaaagttttgttttgttaaaacttagtgactggtattattacaattttaggtgtttggtgcgctcacgcatgtgtataagatataaatcacagtaatgatccttccgcaggttcacctacggaaaccttgttacgacttttacgacctctaaatgaccaagtttgactgaattttcagcgccatgggaaagttgcccctcccgcggcgccaatcttggagcctcactaagccattcaatcggtagtagcgacgggcggtgtgtacaaagggcagggacgtaatcaacgcaagctgatgacttgcgcttactaggaattcctcgttgaagagcaaaaattacaatgctctatccccagcacgacggagtttcacgagattacccgggcctctcgaccaaggatatacttgctggctccgtcagtgtagcgcgcgtgcggcccagaacgtctaagggcatcacagacctgttgttgcctcaaacttccatgggtttgaaacccatagtccctctaagaagagcccacgagcagatgctcgcagccctatttagcaggttaaggtctcgtccgttatcgcaattaagcagacaaatcactccaaggactaaaaacggccatgcaccaccacccgtaagatcaagagaagtctctagcttgtcaatccttattacgtctggacctggtgagtttcccccgtgttgagtcaaattaagccgcaggctccactcctggtggtgcccttccgtcaattcctttaagtttcagccttgcaaccatactccccccagaacccaaagactttgatttctcgtaaggtgccgagtgggcaagaagcgccacccgatccctagtcggcatagtttatggttaagactacgacggtatctgatcatcttcgatcccctaactttcgttcttgattaatgaaaacgtccttggcaaatgctttcgcagtagttagtcttcagttaatccaagaatttcacctctgacaactgaatactgatgcccccgaccgtccctattaatcattacgatggtcctagaaaccaacaaaatagaaccataacgtcctattctattattccatgctaatatatccgagcaaaggcctgctttgaacactctaatttcctcaaagtaatcgtcctggttcactccgaagagttagccagaaggaaaagacccggccgcaacagtacttaccataggtagaccgcccgcccaggcccaaagttcaactacgagctttttaactgcaacaactttaatatacgctattggagctggaattaccgcggctgctggcaccagacttgccctccaattgttcctcgttaaggtatttacattgtactcattccaattacaagaccaatggccctgtatcgttatatattgtcactacctccctgtgtcaggattgggtaatttgcgcgcctgctgccttccttggatgtggtagccgtttctcaggctccctctccggaatcgaacccttattccccgttacccgtgaaaaccatggtaggcctctatcctaccatcgaaagttgatagggcagaaatt

SEQ ID NO: 19 - DNA, 48632 bp, Pichia kluyveri
  >NCYC246_000009F P_kluyveri_NCYC246_TS
aataccgcccgtcttgaaacatggaccaaggagtctaacgtctatgcgagtgtttgggtgtaaaacccgtacgcgtaatgaaagtgaacgtaggtcggaccgctctctcgggggcgggcacgatcgaccgatcctgatgtttatcggatggatttgagtaagagcatagctgttgggacccgaaagatggtgaactatgcctgaatagggtgaagccagaggaaactctggtggaggctcgtagcggttctgacgtgcaaatcgatcgtcgaatttgggtataggggcgaaagactaatcgaaccatctagtagctggttcctgccgaagtttccctcaggatagcagaagctcgtatcagttttatgaggtaaagcgaatgattagacgtctcggggtcgaaatgaccttagcgtattctcaaactttaaatatgtaagaagtccctgttgctttattgaacgcggacgtttgaatgcagagcttttagtgggccatttttggtaagcagaactggcgatgcgggatgaaccgaacgcaaagttaaggtgccggaatgcacgctcatcagacaccacaaaaggtgttagttcatccagacagccggacggtggccatggaagtcggaatccgctaaggagtgtgtaacaactcaccggccgaatgaactagccctgaaaatggatggcgctcaagcgtgttacctatactttgccgccatggcgtgatgccttggcgagtaggcaggcgtgggggtttgtgacgaagccttgggcgtgagcctgggtcgaacggcccctagtgcagatcttggtggtagtagcaaatattcaaatgagaactttgaagactgaagtggggaaaggttccgcgtcaacagcagttggacgcgggttagtcgatcctaagagatggggaagctccgtttcaacgtgtgcaattctttgcaccaccatcgaaagggaatccggttaaaattccggaacttggatgtggattcttcacggcaacgtaacagaatgcggagacgccggcgggagccctgggaggagttttcttttcttcttaacagcttatcaccctggaattggtttatccggagagggggtcttatggctggaagagcgtcgcctttgtttgcgacgtccggtgcgcttgcgacggtccttgaaaatccgcaggaaggaatagttttcacgccaagtcgtactcataaccgcagcaggtctccaaggttaacagcctctagttgatagaataatgtagataagggaagtcggcaaaatagatccgtaacttcgggataaggattggctctaagggttgggtggatgtgcttcctgtgctggccatgcgtgctggcgctgcttcttcgggggcggtgctgctagctacgcttgcgcttgcggcctccacggttaacaaccaacttagaactggtacggacaaggggaatctgactgtctaattaaaacatagcattgcgatggtcagaaagtgatgttgacgcaatgtgatttctgcccagtgctctgaatgtcaaagtgaagaaattcaaccaagcgcgggtaaacggcgggagtaactatgactctcttaaggtagccaaatgcctcgtcatctaattagtgacgcgcatgaatggattaacgagattcccactgtccctatctactatctagcgaaaccacagccaagggaacgggcttggcagaatcagcggggaaagaagaccctgttgagcttgactctagtttgacattgtgaaaagacatagagggtgtagcataagtgggagctccggcgccagtgaaataccactacctttatcgtttttttacttattcaatgaagcggagctggtcttgacgaccacgttctagtgcgaaggcatcttgtgtgccgatccgggttgatgacattgtcaggtggggagtttggctggggcggcacatctgttaaacgataacgcagatgtcctaagggggactcatggagaacagaaatctccagtagaacaaaagggtaaaagtccccttgattttgattttcagtgtgaatacaaaccatgaaagtgtggcctatcgatcctttagtccctcggaatttgaggctagaggtgccagaaaagttaccacagggataactggcttgtggcagtcaagcgctcatagcgacattgctttttgattcttcgatgtcggctcttcctatcataccgaagcagaattcggtaagcgttggattgttcacccactaatagggaacgtgagctgggtttagaccgtcgtgagacaggttagttttaccctactgatgaatgttgtcgcaatagtaattgaacttagtacgagaggaaccgttcattcagataattggtttttgcggctgtctgagcagacactgccgcgaagctaccatctgctggataatggctgaacgcctctaagtcagaatccatgctagaacgcgacgattacttgccctcgcacatttgagaaggataagaataaggcacttgtgtcgcagaaccgtagtaggtcggcagcggtgcgcgtggcggaaaggctgcgtgtgcttgccggcggatggcaatgtcaggatgcgcgaggataaatcctttgcatacgacttagatgtacaacggggtattgtaagcagtagagtagccttgttgttacgatctgctgagattaagcctctgttgtccgatttgttgcttcggcggcgaagttgcagtttgcagatgcgagctgggtatttcggcgagatttggggatgccggcgtggccgggtggtgggcgatgctgttgggtgccattaattcctagtccgtggcttggtgtatggtatacgtgaggacgggggtggtggatttgggtcgatcgtctgggtaggcatattttacctgttttggacttaggattttttcaaataatgtcagacgggatttatgcttacgtaagggaggagagtggtagggtagggattattgattacataaggagaatagctatgatgtcagaggagattaagacttatgattacgtagtgtagtgattacataagacgtacagtggcccgcggagattaagacttatgattacgtagtgtagtgattacttaagatgtacagtggagattagtatagacctgtagacttgtgcttagttaattaagacttgattactgaattagttatgaagtggtgagcgcaataacacgtgagatgactccagtgattcaatcacgtgaataagtagaagtcaagacacagagtcatattaaagaaccaaagagaagaagagtcagagggagttgactctggagaaagaatcacgtgcggacagaggggtttggggaaaaaagggctgggaacgtcccaaagaggcaagtgacgcacagaaattagggaaatatggtggtgaaaaattttcactgcacggctgtagcacgaaaattagtatgtagagacgcaacgacccgaaaaaagagctaaaaagtaaaaaacgcactttttggaaattattaagaaagtaatttattttacacctagaggtcaaaatatgggatttttgactaactttgaacgcttatatctggacaaccagagcaggtatgcactagtgtagggtatgggtgtgaagcctgaatttttgtgcgcatgtaggtatatgtagtgtgtagaatgactgcgggagtaagaagatagtaaacagaaggtgataacggacataaccaaaagacaacgaaagtggtgtcgtggcggcttggcgtggcggctcagcacactgatagcggctcagcagcgtacgataagaaaaaagtcgaggggctcgtgagaaaaaacaattttttcgactcgacgaaaagtggaaaaatgtggcggtggcgggtggcggtgcaggcagtagtggcgcatgcggtgcctgtggcgcagcggaaaattgggttcggaaaattggcgcgcgtggtgaaaagtgacgagcctccgcaaaattgggttcggaaatttgagaaatttttgaaagtgacgagcctccggaattttgggttcggaaatttggcgagaaattctgaaaaagatgagcctccgtaaaaaagtgacgagcctccgcaaaattgggttcggaaaattggcgagaaattctgaaaaagatgagcctccgtaaaaaagtgacgagcctccacgagagaaatgcgccgcaaaaaataatacgcaatacgccacaggaaaatacactactatgaaaaatactatgaaaaaaaaagattgcagcacctgagtttcgcatatggtctcccactacactactcggtcaggctcttagcagcttaactacagttgatcggacgggaaacggtgctttctgctagatatggccgcaaccgacagtgttcgatttcgggcggtattatggatgtcaaaatgaaaaaggccttttttctcgggctacagacgtgctgaggacacgagacccagtgcgttggaatcggattgttcaggagtatctgtgtaaattttatggaggcaaaagaaggggtgaaaatatgattttttatttttcatgggaggtaagtgaagaatttcattgggaatatgtgtgttgatggatgtactagttggaagaagtattttttatgttgttttttttgactttttagagttggatgggcaacagagagcgtagaatatagtggtaaagatttaacatgggcatattttagcgtattggaggagttagaagggtaaagtgtgatatgggtacaacagggagggtgtaataaaaaacaaagtatgttctttttgatgatattatatgcttgatgtggagatccagtggtgtttattatgaaataaaattatcaaagcgaaagacgcactggttgtggagaaataaataggtgaagttagtagagtgccaagttcaacagtgaatatctcgacaaccacgccagctagagacatgccttgtagatagttttgatcagcgtgttttactctctaggagcagtgtttaacatgggcataatggaaattggccaaaaccaaagttcatctggagagaagtggtttcatgggcaagttgactgggagtgcccagtggagctgtgcccagtgaagaggcccttcgtgggcaagcagacaaattgtgtgagtacttggctggaaattttggcaaagtgagaaaaatgcacagcgagggtgttcactggggagttgcccagtagacattttttcatgggcagctgccgggtagaaacccaatatgagaaatttcaaaatcactaagtcaggattctgagagtggtaggaggtacaagaggccagggagagtagagaacagagattggaattggaaaatccggcctgagaggggagttacggggggtgttggtattgttgcccagtgaagtgggaatttcgtgggaagtagactgtgagagttttgaattttttttaaattttgagattcgctgggaagattgaaagtttttgtcgggcaagtattacattccatgggcagtgcccagtgaaggaaaacacacatcaaaatttcctagtttctgtcctattgcttagttacaaagatatgttgatcaggatgctctgtatagtgtgccatgtaattatgaaggtgtaggaaggcatattgggcaagtttgcaaaatgggatttgttagaaatgcatgcacggctgacggctcagcagcattgacaaaaagaaaaacttcacctcgcgctcgaaaacattgcacgccaaaacgaagtccaatttaactcctggacgccgcggccaacgcgcgctgcgaatttttggcaagattacgcagtccgggggatatacatgagaaaagcacttaaaaaatgcggttcttagcggtgttgtgcaccgataggccaagatcccacggagagtatgcaggggcgtctacggacaagcttgggtatggccggggacaagagacgcaagtcttggacaggggcattgtggtcttgcgaccgtggtgcgcactgacggggccggtgggttgctagctgatagccagcggaccactaggtttattggggacggggttggagatgtagccgtgcaaacgtgacatctgggaccactctccactgaagcggacgaagctgtactttgtacaggggacctccgttgaagaaagtcaaacagtgctatgtgtaggttaatccaatcatcataacaaaactcatctgagcgtagttatctggttgatcctgccagtagtcatatgcttgtctcaaagattaagccatgcatgtctaagtataagcattatacggtgaaactgcgaatggctcattaaatcagttatcgtttatttgatagttccgttctacatggataaccgtggaaaatctagagctaatacatgcgtaaagccccgacttcgggaggggtgtatttattagataaaaaatcaatgccctcgggccttttgatgattcataataacttttcgaagctcatggcctttgtgctggagctggttcattcaaatttctgccctatcaactttcgatggtaggatagaggcctaccatggttttcacgggtaacggggaataagggttcgattccggagagggagcctgagaaacggctaccacatccaaggaaggcagcaggcgcgcaaattacccaatcctgacacagggaggtagtgacaatatataacgatacagggccattggtcttgtaattggaatgagtacaatgtaaataccttaacgaggaacaattggagggcaagtctggtgccagcagccgcggtaattccagctccaatagcgtatattaaagttgttgcagttaaaaagctcgtagttgaactttgggcctgggcgggcggtctacctatggtaagtactgttgcggccgggtcttttccttctggctaactcttcggagtgaaccaggacgattactttgaggaaattagagtgttcaaagcaggcctttgctcggatatattagcatggaataatagaataggacgttatggttctattttgttggtttctaggaccatcgtaatgattaatagggacggtcgggggcatcagtattcagttgtcagaggtgaaattcttggattaactgaagactaactactgcgaaagcatttgccaaggacgttttcattaatcaagaacgaaagttaggggatcgaagatgatcagataccgtcgtagtcttaaccataaactatgccgactagggatcgggtggcgcttcttgcccactcggcaccttacgagaaatcaaagtctttgggttctggggggagtatggttgcaaggctgaaacttaaaggaattgacggaagggcaccaccaggagtggagcctgcggcttaatttgactcaacacggggaaactcaccaggtccagacgtaataaggattgacaagctagagacttctcttgatcttacgggtggtggtgcatggccgtttttagtccttggagtgatttgtctgcttaattgcgataacggacgagaccttaacctgctaaatagggctgcgagcatctgctcgtgggctcttcttagagggactatgggtttcaaacccatggaagtttgaggcaacaacaggtctgtgatgcccttagacgttctgggccgcacgcgcgctacactgacggagccagcaagtatatccttggtcgagaggcccgggtaatctcgtgaaactccgtcgtgctggggatagagcattgtaatttttgctcttcaacgaggaattcctagtaagcgcaagtcatcagcttgcgttgattacgtccctgccctttgtacacaccgcccgtcgctactaccgattgaatggcttagtgaggctccaagattggcgccgcgggaggggcaactttcccatggcgctgaaaattcagtcaaacttggtcatttagaggtcgtaaaagtcgtaacaaggtttccgtaggtgaacctgcggaaggatcattactgtgatttatatcttatacacatgcgtgagcgcaccaaacacctaaaattgtaataataccagtcactaagttttaacaaaacaaaactttcaacaacggatctcttggttctcgcatcgatgaagagcgcagcgaaatgcgatacctagtgtgaattgcagccatcgtgaatcatcgagttcttgaacgcacattgcgccccatggtattccatggggcatgcctgtctgagcgtcgtttccttcttgcgcaagcagagttgagaacaggctatgcctttttcgaaatggaacgtcgtggacgaagtgaactaaattattggaacgctttggccgccgaacttttaactaagctcgacctcagatcaggtaggaatacccgctgaacttaagcatatcaataagcggaggaaaagaaaccaacagggattgcctcagtagcggcgagtgaagcggcaagagctcagatttgaaatctcacctagtgtgcgagttgtaaattgcaggttggagtctcgggttagacgtgtgtgcaagtcccttggaacagggtgccactgagggtgagagccccgtatcgtgcatgtcgacacctgtgaggcccttctgacgagtcgagttgtttgggaatgcagctctaagtgggtggtaaattccatctaaggctaaatattggcgagagaccgatagcgaacaagtactgtgaaggaaagatgaaaagcactttgaaaagagagtgaaacagcacgtgaaattgttgaaagggaagggtattgggctcgacatgggatttacgcatcgttgcctctcgtgggcggcgctctgggtttttcctgggccagcatcggttttcgttgcaggataaggacaattggaatgtggctcctcggagtgttatagccttttgtagatgctgcgtatggggaccgagggctgcggcggactcgtttcgtctcggatgctggcacaacggcgcaataccgcccgtcttgaaacatggaccaaggagtctaacgtctatgcgagtgtttgggtgtaaaacccgtacgcgtaatgaaagtgaacgtaggtcggaccgctctctcgggggcgggcacgatcgaccgatcctgatgtttatcggatggatttgagtaagagcatagctgttgggacccgaaagatggtgaactatgcctgaatagggtgaagccagaggaaactctggtggaggctcgtagcggttctgacgtgcaaatcgatcgtcgaatttgggtataggggcgaaagactaatcgaaccatctagtagctggttcctgccgaagtttccctcaggatagcagaagctcgtatcagttttatgaggtaaagcgaatgattagacgtctcggggtcgaaatgaccttagcgtattctcaaactttaaatatgtaagaagtccctgttgctttattgaacgcggacgtttgaatgcagagcttttagtgggccatttttggtaagcagaactggcgatgcgggatgaaccgaacgcaaagttaaggtgccggaatgcacgctcatcagacaccacaaaaggtgttagttcatccagacagccggacggtggccatggaagtcggaatccgctaaggagtgtgtaacaactcaccggccgaatgaactagccctgaaaatggatggcgctcaagcgtgttacctatactttgccgccatggcgtgatgccttggcgagtaggcaggcgtgggggtttgtgacgaagccttgggcgtgagcctgggtcgaacggcccctagtgcagatcttggtggtagtagcaaatattcaaatgagaactttgaagactgaagtggggaaaggttccgcgtcaacagcagttggacgcgggttagtcgatcctaagagatggggaagctccgtttcaacgtgtgcaattctttgcaccaccatcgaaagggaatccggttaaaattccggaacttggatgtggattcttcacggcaacgtaacagaatgcggagacgccggcgggagccctgggaggagttttcttttcttcttaacagcttatcaccctggaattggtttatccggagagggggtcttatggctggaagagcgtcgcctttgtttgcgacgtccggtgcgcttgcgacggtccttgaaaatccgcaggaaggaatagttttcacgccaagtcgtactcataaccgcagcaggtctccaaggttaacagcctctagttgatagaataatgtagataagggaagtcggcaaaatagatccgtaacttcgggataaggattggctctaagggttgggtggatgtgcttcctgtgctggccatgcgtgctggcgctgcttcttcgggggcggtgctgctagctacgcttgcgcttgcggcctccacggttaacaaccaacttagaactggtacggacaaggggaatctgactgtctaattaaaacatagcattgcgatggtcagaaagtgatgttgacgcaatgtgatttctgcccagtgctctgaatgtcaaagtgaagaaattcaaccaagcgcgggtaaacggcgggagtaactatgactctcttaaggtagccaaatgcctcgtcatctaattagtgacgcgcatgaatggattaacgagattcccactgtccctatctactatctagcgaaaccacagccaagggaacgggcttggcagaatcagcggggaaagaagaccctgttgagcttgactctagtttgacattgtgaaaagacatagagggtgtagcataagtgggagctccggcgccagtgaaataccactacctttatcgtttttttacttattcaatgaagcggagctggtcttgacgaccacgttctagtgcgaaggcatcttgtgtgccgatccgggttgatgacattgtcaggtggggagtttggctggggcggcacatctgttaaacgataacgcagatgtcctaagggggactcatggagaacagaaatctccagtagaacaaaagggtaaaagtccccttgattttgattttcagtgtgaatacaaaccatgaaagtgtggcctatcgatcctttagtccctcggaatttgaggctagaggtgccagaaaagttaccacagggataactggcttgtggcagtcaagcgctcatagcgacattgctttttgattcttcgatgtcggctcttcctatcataccgaagcagaattcggtaagcgttggattgttcacccactaatagggaacgtgagctgggtttagaccgtcgtgagacaggttagttttaccctactgatgaatgttgtcgcaatagtaattgaacttagtacgagaggaaccgttcattcagataattggtttttgcggctgtctgagcagacactgccgcgaagctaccatctgctggataatggctgaacgcctctaagtcagaatccatgctagaacgcgacgattacttgccctcgcacatttgagaaggataagaataaggcacttgtgtcgcagaaccgtagtaggtcggcagcggtgcgcgtggcggaaaggctgcgtgtgcttgccggcggatggcaatgtcaggatgcgcgaggataaatcctttgcatacgacttagatgtacaacggggtattgtaagcagtagagtagccttgttgttacgatctgctgagattaagcctctgttgtccgatttgttgcttcggcggcgaagttgcagtttgcagatgcgagctgggtatttcggcgagatttggggatgccggcgtggccgggtggtgggcgatgctgttgggtgccattaattcctagtccgtggcttggtgtatggtatacgtgaggacgggggtggtggatttgggtcgatcgtctgggtaggcatattttacctgttttggacttaggattttttcaaataatgtcagacgggatttatgcttacgtaagggaggagagtggtagggtagggattattgattacataaggagaatagctatgatgtcagaggagattaagacttatgattacgtagtgtagtgattacataagacgtacagtggcccgcggagattaagacttatgattacgtagtgtagtgattacttaagatgtacagtggagattagtatagacctgtagacttgtgcttagttaattaagacttgattactgaattagttatgaagtggtgagcgcaataacacgtgagatgactccagtgattcaatcacgtgaataagtagaagtcaagacacagagtcatattaaagaaccaaagagaagaagagtcagagggagttgactctggagaaagaatcacgtgcggacagaggggtttggggaaaaaagggctgggaacgtcccaaagaggcaagtgacgcacagaaattagggaaatatggtggtgaaaaattttcactgcacggctgtagcacgaaaattagtatgtagagacgcaacgacccgaaaaaagagctaaaaagtaaaaaacgcactttttggaaattattaagaaaggtaatttattttacacctagaggtcaaaaatatgggaatttttgactaactttgacgcttatatctggacaaccagagcaggtatgcactaggtagggtatgggtgtgaagcctgaatttttgtgcgcatgtaggtatatgtagtgtgtagaatgactgcgggagtagaaagatagtaaacagaaggtgataacggacataaccaaaagacaacgaaagtggtgtcgtgggcggcttggcgtggcggctcagcacactgatagcggctcgcagcgtacgataagaaaaaagtcgaggggctcgtgagaaaaaacaattttttcgactcgacgaaagtggaaaaatgtggcggtggcgggtggcggtgcagggcagtagtggcgcaatgcggtgcctgtggcgcagcggaaaattgggttcggaaaattggcgcgcgtgggtgaaaagtgacgagccctccgcaaaaattggggttcggaaatttgagaaaatttttgaaagtgacgagcctccggaattttgggttcggaaatttggcgagaaattctgaaaaagatgagcctccgtaaaaaagtgacgagcctccgcaaaattgggttcggaaaattggcgagaaattctgaaaaagatgagcctccgtaaaaaagtgacgagcctccacgagagaaatgcgccgcaaaaaataatacgcaatacgccacaggaaaatacactactatgaaaaatactatgaaaaaaaaagattgcagcacctgagtttcgcatatggtctcccactacactactcggtcaggctcttagcagcttaactacagttgatcggacgggaaacggtgctttctgctagatatggccgcaaccgacagtgttcgatttcgggcggtattatggatgtcaaaatgaaaaaggccttttttctcgggctacagacgtgctgaggacacgagacccagtgcgttggaatcggattgttcaggagtatctgtgtaaatttatggaggcaaaagaaggggtgaaaaatatgattttttatttttcatagggaggtaagtgaagaatttcattgggaatatgtgtgttgatggatggtactagttggaaagaagtattttttaatgttgttttttttgactttttagagttggatgggcacagagagcgtagaatatagtgtgtaaagatttaacatgggcatattttagcgtattggaggagttagaagggtgaaagtgtgatatggtacaaacagggagggtgtaataaaaaacaaagtatgttctttttgatgattatatgcttgatgtggagatccagtggtgtttattatgaaataaattatcaaagcgaaagacgcactgggttgtggagaaataaatagggtgaagttagtagagtgccaagttcaacagtgaatatctcgacaaccacgccagctagagacatgcctttgtagatagttttgatcagcgtgttttactctctaggagcagtgtttaacatgggcataatggaaattggccaaaaccaaagttcatctggagagaagtggtttcatgggcaagttgactgggagtgcccagtggagctgtgcccagtgaagaggcccttcgtgggcaagcagacaaattgtgtgagtacttggctggaaattttggcaaagtgagaaaaatgcacagcgagggtgttcactggggagttgcccagtagacattttttcatgggcagctgccgggtagaaacccaatatgagaaatttcaaaatcactaagtcaggattctgagagtggtaggaggtacaagaggccagggagagtagagaacagagattggaattggaaaatccggcctgagaggggagttacggggggtgttggtattgttgcccagtgaagtgggaatttcgtgggaagtagactgtgagagttttgaattttttttaaattttgagattcgctgggaagattgaaagtttttgtcgggcaagtattacattccatgggcagtgccagtggaagggaaaaacacactatcaaaattcctagtttctgtcctattgcttagttacaaagatatgttgatcaggatgctctgtatagtgtgccatgtaattatgaaggtgtaggaaaggcatattgggcaagtttgcaaaatggggatttgttagaaatgcatgcacggctgacggctcagcagcattgacaaaaagaaaaacttcacctcgcgctcagaaaacattgcacgccaaaacgaagtccaatttaactcctggacgccgcggccacgcgcgctggccgaattttttggcaagattacgcagtccgggggatatacatgagaaaagcacttaaaaaaatgcggttcttagcgtgttgtgcaccgatagggcccaagatcccacggagagtatgcaggggcgtctacggacaagcttgggtatggccggggacaagagacgcaagtcttggacaaggggcattgtgtcttgcgaccgtgggtgcgcactggacggggccggtgggttgctagctgatagccagcggaccactaggtttattggggacggggttggagatgtagccgtgcaaacgtgacatctgggaccactctccactgaagcggacgaagctgtactttgtacaggggacctccgttgaagaaagtcaaacagtgctatgtgtaggttaatccaatcatcataacaaaactcatctgagcgtagttatctggttgatcctgccagtagtcatatgcttgtctcaaagattaagccatgcatgtctaagtataagcattatacggtgaaactgcgaatggctcattaaatcagttatcgtttatttgatagttccgttctacatggataaccgtggaaaatctagagctaatacatgcgtaaagccccgacttcgggaggggtgtatttattagataaaaaatcaatgccctcgggccttttgatgattcataataacttttcgaagctcatggcctttgtgctggagctggttcattcaaatttctgccctatcaactttcgatggtaggatagaggcctaccatggttttcacgggtaacggggaataagggttcgattccggagagggagcctgagaaacggctaccacatccaaggaaggcagcaggcgcgcaaattacccaatcctgacacagggaggtagtgacaatatataacgatacagggccattggtcttgtaattggaatgagtacaatgtaaataccttaacgaggaacaattggagggcaagtctggtgccagcagccgcggtaattccagctccaatagcgtatattaaagttgttgcagttaaaaagctcgtagttgaactttgggcctgggcgggcggtctacctatggtaagtactgttgcggccgggtcttttccttctggctaactcttcggagtgaaccaggacgattactttgaggaaattagagtgttcaaagcaggcctttgctcggatatattagcatggaataatagaataggacgttatggttctattttgttggtttctaggaccatcgtaatgattaatagggacggtcgggggcatcagtattcagttgtcagaggtgaaattcttggattaactgaagactaactactgcgaaagcatttgccaaggacgttttcattaatcaagaacgaaagttaggggatcgaagatgatcagataccgtcgtagtcttaaccataaactatgccgactagggatcgggtggcgcttcttgcccactcggcaccttacgagaaatcaaagtctttgggttctggggggagtatggttgcaaggctgaaacttaaaggaattgacggaagggcaccaccaggagtggagcctgcggcttaatttgactcaacacggggaaactcaccaggtccagacgtaataaggattgacaagctagagacttctcttgatcttacgggtggtggtgcatggccgtttttagtccttggagtgatttgtctgcttaattgcgataacggacgagaccttaacctgctaaatagggctgcgagcatctgctcgtgggctcttcttagagggactatgggtttcaaacccatggaagtttgaggcaacaacaggtctgtgatgcccttagacgttctgggccgcacgcgcgctacactgacggagccagcaagtatatccttggtcgagaggcccgggtaatctcgtgaaactccgtcgtgctggggatagagcattgtaatttttgctcttcaacgaggaattcctagtaagcgcaagtcatcagcttgcgttgattacgtccctgccctttgtacacaccgcccgtcgctactaccgattgaatggcttagtgaggctccaagattggcgccgcgggaggggcaactttcccatggcgctgaaaattcagtcaaacttggtcatttagaggtcgtaaaagtcgtaacaaggtttccgtaggtgaacctgcggaaggatcattactgtgatttatatcttatacacatgcgtgagcgcaccaaacacctaaaattgtaataataccagtcactaagttttaacaaaacaaaactttcaacaacggatctcttggttctcgcatcgatgaagagcgcagcgaaatgcgatacctagtgtgaattgcagccatcgtgaatcatcgagttcttgaacgcacattgcgccccatggtattccatggggcatgcctgtctgagcgtcgtttccttcttgcgcaagcagagttgagaacaggctatgcctttttcgaaatggaacgtcgtggacgaagtgaactaaattattggaacgctttggccgccgaacttttaactaagctcgacctcagatcaggtaggaatacccgctgaacttaagcatatcaataagcggaggaaaagaaaccaacagggattgcctcagtagcggcgagtgaagcggcaagagctcagatttgaaatctcacctagtgtgcgagttgtaaattgcaggttggagtctcgggttagacgtgtgtgcaagtcccttggaacagggtgccactgagggtgagagccccgtatcgtgcatgtcgacacctgtgaggcccttctgacgagtcgagttgtttgggaatgcagctctaagtgggtggtaaattccatctaaggctaaatattggcgagagaccgatagcgaacaagtactgtgaaggaaagatgaaaagcactttgaaaagagagtgaaacagcacgtgaaattgttgaaagggaagggtattgggctcgacatgggatttacgcatcgttgcctctcgtgggcggcgctctgggtttttcctgggccagcatcggttttcgttgcaggataaggacaattggaatgtggctcctcggagtgttatagccttttgtagatgctgcgtatggggaccgagggctgcggcggactcgtttcgtctcggatgctggcacaacggcgcaataccgcccgtcttgaaacatggaccaaggagtctaacgtctatgcgagtgtttggggtgtaaaacccgtacgcgtaatgaaagtgaacgtaggtcgaccgctctctcggggggcgggcacgatcgaccgatcctgatgttttcggatggatttgagtaagagcatagctgttgggacccgaaaagatgtgaactatgcctgaatagggtgaagccagaggaaactctggtggaggctcgtagcggttctgacgtgcaaatcgatcgtcgaatttgggtatagggggcgaaagactaatcgaaccatctagtagctggttcctgccgaagtttccctcagatagcagaagctcgtatcagttttatgaggtaaagcgaatgattagacgtctcggggtcgaaatgaccttagcgtattctcaactttaaatatgtaagaagtcctgttgctttattgaacgcggacgtttgaatgcagagcttttagtgggccatttttggtaagcagaactggcgatgcgggatgaaccgaacgcaaagttaaggtgccggaatgcacgctcatcagacaccacaaaaggtgtttagttcatccagacagccggacggtggccatggaagtcggaatccgctaaggagtgtgtaacaactcaccggccgaatgaactagccctgaaaatggatggcgctcaagcgtgttacctatactttgccgccatggcgtgatgccttggcgagtaggcagggcgtgggggtttgtgacgaagccttgggcgtgagcctgggtcgaacggccctagtgcagatcttggtggtagtagcaaatattcaaatgagaactttgaagactgaagtggggaaaggttccgcgtccaacagcagttggacgcgggttagtcgatcctaagagatggggaagctccgtttcaacgtgtgcaattctttgcaccaccatcgaaagggaatccggttaaaattccggaacttggatgtggattcttcagggcaacgtaacagaatgcggagacgaccgggcgggagccctgggaggagttttcttttcttcttaacagcttatcaccctggaattggtttatccggagagggggtcttatggctggaagagcgtcgcctttgtttgcgacggtccggtgcgcttgcgacggtccttgaaaatccgcaggaaggaatagttttcacgccaagtcgtactcataacccgcagcaggtctccaaggttaacagcctctagttgatagaataatgtagataagggaagtcggcaaaatagatccgtaacttcgggataaggattggctctaagggttgggtggatgtgcttcctgtgtctggccatgcgtgctggcgctgcttcttccggggcggtgctgctagctacgcttgcgcttgcggcctccacggttaacaaccaacttagaactggtacggacaagggaatctgactgtctaattaaaacatagcattgcgatggtcagaaagtgatgttgacgcaatgtgatttctgcccagtgctctgaatgtcaaagtgaagaaattcaaccaagcgcgggtaaacggcgggagtaactatgactctcttaaggtagccaaatgcctcgtccatctaattagtgacaggcgcatgaatggattaacgagatttcccactgtccctatctactatctagcgaaaccacagccagggaacgggcttggcagaatcagcggggaaagaagaccctgttgagcttgactctagtttgacattgtgaaaagacatagaggggtgtagcataagtggggagctccgcgccagtgaaataccactacctttatcgtttttttacttattcaatgaagcggagctggtcttgacgaccacgttctagtgcaaggcatcttgtgtgccgatccgggttgatgacattggcaggtggggagtttggctggggcggcacatctgttaacacgataacgcagatgtcctaagggggactcatggagaacagaaattctccagtagagaacaaaagggtaaaagtccccttgattttgattttcagtgtgaatacaaaccatgaaagtgtggcctagtcgatcctttagtagtccctcggaatttgagctagaggtgccagaaaagttaccacagggataaactggcttgtggcagtcaagcgctcatagcgaccccattgctttttgagattcttcgatgtcggctcttcctatcataccgaagcagaattcggtaagcgttggattgtttcacgccactaatagggacgttgagctgggtttagaccgtcgtgagacaggttagttttaccctactgatgaatgttgtccgcaatagtaattgaacttagtacgagaggaaccgttcattcagataattggtttttgcggctgtctgagcagacactgccgcgaagctaccatctgctggataatggctgagacgcctctaaggtcagaatccatgctagaacgcgaacgattacttgccctcgagcacatttgagaaggataagaataaggtcacttgtgtcgcagaaccgtagtaggtcggcagcggtgcgcgtggcggaaaggctgcgtgttgcttgccggcggatggcaatgtcaggatgtcgcgaggataaatcctttgcatacgacttagatgtacaacggggtattgtaagcagtagagtagccttgttgttacgatctgctgagattaagccctctggtgtccgatttgttgcttcggcggcgaagttgcagtttgcagatgcgagctgggtatttcgtgcgagatttggggatagcaggtcgtggccggggtggtgggcgatgctgttgggtgccattattcctagtccgtggcttggtgtatggtatacgtgaggacgggggttggtggatttgggtcgaatcgtctgggtaggcatattttacctgtttggacttaggacttttttcaaataatgtcagacgggatttatgcttacgtaaggaggagagtggtagggtagggattatgattacataaggagaatagctatgatgtcagagggagattaagacttatgattacgtagtgtagtgattacataagacgtacagtggcccgcgggattgagacttatgattacgtagtggagtgagttattacttaagattaccagtggagattagtatagacctgtagacttgtgcttagttaattaagacttgattactgaattagttatgaagtggtgagcgcaataacacgtgagatgaatccagtgattcaatcacgtgaatagtagaagtcaagacacatagtcatattaaagaaccaaagagaagaagagtcagagggagttgactctggagaaagaatcacgtgcggacagaggggttttggggaaaaaagggctggggaaacgtcccaaaggaggcagtgacgcacagaaattagggaaatatggtgggtgaaaaaattttcactgcacggctgtagcacgaaaattagtatgtagagacgcaacgacccgaaaaaagagctaaaaaaagtaaaaaaccgcacttttttggaaattattaagaagtaatttatttacacctagaggtcaaaatatgggagtttttgactaactttgaacgcttatatctggacaaccagagcaggtatgcactagtgtagggtatgggtgtgaagcctgaatttttgtgcgcatgtaggtatatgtagtgtgtagaatgactgcgggagtaagaagatagtaaacagaaggtgataacggacataaccaaaagacaacgaaagtggtgtcgtggcggcttggcgtggcggctcagcacactgatagcggctcagcagcgtacgataagaaaaaagtcgaggggctcgtgagaaaaaacaattttttcgactcgacgaaaagtggaaaaatgtggcggtggcgggtggcggtgcaggcagtagtggcgcatgcggtgcctgtggcgcagcggaaaattgggttcggaaaattggcgcgcgtggtgaaaagtgacgagcctccgcaaaattgggttcggaaatttgagaaatttttgaaagtgacgagcctccggaattttgggttcggaaatttggcgagaaattctgaaaaagatgagcctccgtaaaaaagtgacgagcctccgcaaaattgggttcggaaaattggcgagaaattctgaaaaagatgagcctccgtaaaaaagtgacgagcctccacgagagaaatgcgccgcaaaaaataatacgcaatacgccacaggaaaatacactactatgaaaaatactatgaaaaaaaaagattgcagcacctgagtttcgcatatggtctcccactacactactcggtcaggctcttagcagcttaactacagttgatcggacgggaaacggtgctttctgctagatatggccgcaaccgacagtgttcgatttcgggcggtattatggatgtcaaaatgaaaaaggccttttttctcgggctacagacgtgctgaggacacgagacccagtgcgttggaatcggattgttcaggagtatctgtgtaaattttatggaggcaaaagaaggggtgaaaatatgattttttatttttcatggaggtaagtggaagaatttcattgggatatgtgtgttgatggatgtaactaggttggaagaagtatttttatgttgtttttttttgactttttagagttggatgggcaacagagagcgtagaatatagtggtaaagatttaacatggggcatattttagcgtattggagggagttagagagggtaacgtgtgatatgggtacaacagggagggtgtaataaaaaacaaagtatgttctttttgatgatattatatgcttgatgtggagatccagtggtgtttattatgaaataaaattatcagagcgaaaagaccactggttgtggagaaataaataggttagaagttagtagagtggccaagttcaacagtgaatatctcgacaaccacgccactagagacatgccttgtagatagtttgatcagcgtgtttactctctaggacaggtgtttacagtgggcataatggaagattggccaaaaccaaagttcatctggagagaagtggtttcatgggcaagttgactgggagtgcccagtggagctgtgcccagtgaagaggcccttcgtgggcaagcagacaaattgtgtgagtacttggctggaaattttggcaaagtgagaaaaatgcacagcgagggtgttcactggggagttgcccagtagacattttttcatgggcagctgccgggtagaaacccaatatgagaaatttcaaaatcactaagtcaggattctgagagtggtaggaggtacaagaggccagggagagtagagaacagagattggaattggaaaatccggcctgagaggggagttacggggggtgttggtattgttgcccagtgaagtgggaatttcgtgggaagtagactgtgagagttttgaattttttttaaattttgagattcgctgggaagattgaaagtttttgtcgggcaagtattacattccatgggcagtgcccagtgaaggaaaacacacatcaaaatttcctagtttctgtcctattgcttagttacaaagatatgttgatcaggatgctctgtatagtgtgccatgtaattatgaaggtgtaggaaggcatattgggcaagtttgcaaaatgggatttgttagaaatgcatgcacggctgacggctcagcagcattgacaaaaagaaaaacttcacctcgcgctcgaaaacattgcacgccaaaacgaagtccaatttaactcctggacgccgcggccaacgcgcgctgcgaatttttggcaagattacgcagtccgggggatatacatgagaaaagcacttaaaaaatgcggttcttagcggtgttgtgcaccgataggccaagatcccacggagagtatgcaggggcgtctacggacaagcttgggtatggccggggacaagagacgcaagtcttggacaggggcattgtggtcttgcgaccgtggtgcgcactgacggggccggtgggttgctagctgatagccagcggaccactaggtttattggggacggggttggagatgtagccgtgcaaacgtgacatctgggaccactctccactgaagcggacgaagctgtactttgtacaggggacctccgttgaagaaagtcaaacagtgctatgtgtaggttaatccaatcatcataacaaaactcatctgagcgtagttatctggttgatcctgccagtagtcatatgcttgtctcaaagattaagccatgcatgtctaagtataagcattatacggtgaaactgcgaatggctcattaaatcagttatcgtttatttgatagttccgttctacatggataaccgtggaaaatctagagctaatacatgcgtaaagccccgacttcgggaggggtgtatttattagataaaaaatcaatgccctcgggccttttgatgattcataataacttttcgaagctcatggcctttgtgctggagctggttcattcaaatttctgccctatcaactttcgatggtaggatagaggcctaccatggttttcacgggtaacggggaataagggttcgattccggagagggagcctgagaaacggctaccacatccaaggaaggcagcaggcgcgcaaattacccaatcctgacacagggaggtagtgacaatatataacgatacagggccattggtcttgtaattggaatgagtacaatgtaaataccttaacgaggaacaattggagggcaagtctggtgccagcagccgcggtaattccagctccaatagcgtatattaaagttgttgcagttaaaaagctcgtagttgaactttgggcctgggcgggcggtctacctatggtaagtactgttgcggccgggtcttttccttctggctaactcttcggagtgaaccaggacgattactttgaggaaattagagtgttcaaagcaggcctttgctcggatatattagcatggaataatagaataggacgttatggttctattttgttggtttctaggaccatcgtaatgattaatagggacggtcgggggcatcagtattcagttgtcagaggtgaaattcttggattaactgaagactaactactgcgaaagcatttgccaaggacgttttcattaatcaagaacgaaagttaggggatcgaagatgatcagataccgtcgtagtcttaaccataaactatgccgactagggatcgggtggcgcttcttgcccactcggcaccttacgagaaatcaaagtctttgggttctggggggagtatggttgcaaggctgaaacttaaaggaattgacggaagggcaccaccaggagtggagcctgcggcttaatttgactcaacacggggaaactcaccaggtccagacgtaataaggattgacaagctagagacttctcttgatcttacgggtggtggtgcatggccgtttttagtccttggagtgatttgtctgcttaattgcgataacggacgagaccttaacctgctaaatagggctgcgagcatctgctcgtgggctcttcttagagggactatgggtttcaaacccatggaagtttgaggcaacaacaggtctgtgatgcccttagacgttctgggccgcacgcgcgctacactgacggagccagcaagtatatccttggtcgagaggcccgggtaatctcgtgaaactccgtcgtgctggggatagagcattgtaatttttgctcttcaacgaggaattcctagtaagcgcaagtcatcagcttgcgttgattacgtccctgccctttgtacacaccgcccgtcgctactaccgattgaatggcttagtgaggctccaagattggcgccgcgggaggggcaactttcccatggcgctgaaaattcagtcaaacttggtcatttagaggtcgtaaaagtcgtaacaaggtttccgtaggtgaacctgcggaaggatcattactgtgatttatatcttatacacatgcgtgagcgcaccaaacacctaaaattgtaataataccagtcactaagttttaacaaaacaaaactttcaacaacggatctcttggttctcgcatcgatgaagagcgcagcgaaatgcgatacctagtgtgaattgcagccatcgtgaatcatcgagttcttgaacgcacattgcgccccatggtattccatggggcatgcctgtctgagcgtcgtttccttcttgcgcaagcagagttgagaacaggctatgcctttttcgaaatggaacgtcgtggacgaagtgaactaaattattggaacgctttggccgccgaacttttaactaagctcgacctcagatcaggtaggaatacccgctgaacttaagcatatcaataagcggaggaaaagaaaccaacagggattgcctcagtagcggcgagtgaagcggcaagagctcagatttgaaatctcacctagtgtgcgagttgtaaattgcaggttggagtctcgggttagacgtgtgtgcaagtcccttggaacagggtgccactgagggtgagagccccgtatcgtgcatgtcgacacctgtgaggcccttctgacgagtcgagttgtttgggaatgcagctctaagtgggtggtaaattccatctaaggctaaatattggcgagagaccgatagcgaacaagtactgtgaaggaaagatgaaaagcactttgaaaagagagtgaaacagcacgtgaaattgttgaaagggaagggtattgggctcgacatgggatttacgcatcgttgcctctcgtgggcggcgctctgggtttttcctgggccagcatcggttttcgttgcaggataaggacaattggaatgtggctcctcggagtgttatagccttttgtagatgctgcgtatggggaccgagggctgcggcggactcgtttcgtctcggatgctggcacaacggcgcaataccgcccgtcttgaaacatggaccaaggagtctaacgtctatgcgagtgtttgggtgtaaaacccgtacgcgtaatgaaagtgaacgtaggtcggaccgctctctcgggggcgggcacgatcgaccgatcctgatgtttatcggatggatttgagtaagagcatagctgttgggacccgaaagatggtgaactatgcctgaatagggtgaagccagaggaaactctggtggaggctcgtagcggttctgacgtgcaaatcgatcgtcgaatttggtataggggcgaaagactaatcgaaccatctagtagctggttcctgccgaagtttccctcaggatagcagaagctcgtatcagttttatgaggtaaagcgaatgattagacgtctcggggtcgaaatgaccttagcgtattctcaaactttaaatatgtaagaagtccctgttgctttattgaacgcggacgtttgaatgcagagcttttagtgggccatttttggtaagcagaactggcgatgcgggatgaaccgaacgcaaagttaaggtgccggaatgcacgctcatcagacaccacaaaaggtgttagttcatccagacagccggacggtggccatggaagtcggaatccgctaaggagtgtgtaacaactcaccggccgaatgaactagccctgaaaatggatggcgctcaagcgtgttacctatactttgccgccatggcgtgatgccttggcgagtaggcaggcgtgggggtttgtgacgaagccttgggcgtgagcctgggtcgaacggcccctagtgcagatcttggtggtagtagcaaatattcaaatgagaactttgaagactgaagtggggaaaggttccgcgtcaacagcagttggacgcgggttagtcgatcctaagagatggggaagctccgtttcaacgtgtgcaattctttgcaccaccatcgaaagggaatccggttaaaattccggaacttggatgtggattcttcacggcaacgtaacagaatgcggagacgccggcgggagccctgggaggagttttcttttcttcttaacagcttatcaccctggaattggtttatccggagagggggtcttatggctggaagagcgtcgcctttgtttgcgacgtccggtgcgcttgcgacggtccttgaaaatccgcaggaaggaatagttttcacgccaagtcgtactcataaccgcagcaggtctccaaggttaacagcctctagttgatagaataatgtagataagggaagtcggcaaaatagatccgtaacttcgggataaggattggctctaagggttgggtggatgtgcttcctgtgctggccatgcgtgctggcgctgcttcgggggcggtgctgctagctacgcttgcgcttgcggcctccacggttaacaaccaacttagaactggtacggacaaggggaatctgactgtctaattaaaacatagcattgcgatggtcagaaagtgatgttgacgcaatgtgatttctgcccagtgctctgaatgtcaaagtgaagaaattcaaccaagcgcgggtaaacggcgggagtaactatgactctcttaaggtagccaaatgcctcgtcatctaattagtgacgcgcatgaatggattaacgagattcccactgtccctatctactatctagcgaaaccacagccaagggaacgggcttggcagaatcagcggggaaagaagaccctgttgagcttgactctagtttgacattgtgaaaagacatagagggtgtagcataagtgggagctccggcgccagtgaaataccactacctttatcgtttttttacttattcaatgaagcggagctggtcttgacgaccacgttctagtgcgaaggcatcttgtgtgccgatccgggttgatgacattgtcaggtggggagtttggctggggcggcacatctgttaaacgataacgcagatgtcctaagggggactcatggagaacagaaatctccagtagaacaaaagggtaaaagtccccttgattttgattttcagtgtgaatacaaaccatgaaagtgtggcctatcgatcctttagtccctcggaatttgaggctagaggtgccagaaaagttaccacagggataactggcttgtggcagtcaagcgctcatagcgacattgctttttgattcttcgatgtcggctcttcctatcataccgaagcagaattcggtaagcgttggattgttcacccactaatagggaacgtgagctgggtttagaccgtcgtgagacaggttagttttaccctactgatgaatgttgtcgcaatagtaattgaacttagtacgagaggaaccgttcattcagataattggtttttgcggctgtctgagcagacactgccgcgaagctaccatctgctggataatggctgaacgcctctaagtcagaatccatgctagaacgcgacgattacttgccctcgcacatttgagaaggataagaataaggcacttgtgtcgcagaaccgtagtaggtcggcagcggtgcgcgtggcggaaaggctgcgtgtgcttgccggcggatggcaatgtcaggatgcgcgaggataaatcctttgcatacgacttagatgtacaacggggtattgtaagcagtagagtagccttgttgttacgatctgctgagattaagcctctgttgtccgatttgttgcttcggcggcgaagttgcagtttgcagatgcgagctgggtatttcggcgagatttggggatgccggcgtggccgggtggtgggcgatgctgttgggtgccattaattcctagtccgtggcttggtgtatggtatacgtgaggacgggggtggtggatttgggtcgatcgtctgggtaggcatattttacctgttttggacttaggattttttcaaataatgtcagacgggatttatgcttacgtaagggaggagagtggtagggtagggattattgattacataaggagaatagctatgatgtcagaggagattaagacttatgattacgtagtgtagtgattacataagacgtacagtggcccgcggagattaagacttatgattacgtagtgtagtgattacttaagatgtacagtggagattagtatagacctgtagacttgtgcttagttaattaagacttgattactgaattagttatgaagtggtgagcgcaataacacgtgagatgactccagtgattcaatcacgtgaataagtagaagtcaagacacagagtcatattaaagaaccaaagagaagaagagtcagagggagttgactctggagaaagaatcacgtgcggacagaggggtttggggaaaaaagggctgggaacgtcccaaagaggcaagtgacgcacagaaattagggaaatatggtggtgaaaaattttcactgcacggctgtagcacgaaaattagtatgtagagagacgcaacgacccgaaaaaagagctaaaaagtaaaaaacgcactttttggaaattattaagaaagtaatttattttacacctagaggtcaaaatatgggatttttgactaactttgaacgcttatatctggacaaccagagcaggtatgcactagtgtagggtatgggtgtgaagcctgaatttttgtgcgcatgtaggtatatgtagtgtgtagaatgactgcgggagtaagaagatagtaaacagaaggtgataacggacataaccaaaagacaacgaaagtggtgtcgtggcggcttggcgtggcggctcagcacactgatagcggctcagcagcgtacgataagaaaaaagtcgaggggctcgtgagaaaaaacaattttttcgactcgacgaaaagtggaaaaatgtggcggtggcgggtggcggtgcaggcagtagtggcgcatgcggtgcctgtggcgcagcggaaaattgggttcggaaaattggcgcgcgtggtgaaaagtgacgagcctccgcaaaattgggttcggaaatttgagaaatttttgaaagtgacgagcctccggaattttgggttcggaaatttggcgagaaattctgaaaaagatgagcctccgtaaaaaagtgacgagcctccgcaaaattgggttcggaaaattggcgagaaattctgaaaaagatgagcctccgtaaaaaagtgacgagcctccacgagagaaatgcgccgcaaaaaataatacgcaatacgccacaggaaaatacactactatgaaaaatactatgaaaaaaaaagattgcagcacctgagtttcgcatatggtctcccactacactactcggtcaggctcttagcagcttaactacagttgatcggacgggaaacggtgctttctgctagatatggccgcaaccgacagtgttcgatttcgggcggtattatggatgtcaaaatgaaaaaggccttttttctcgggctacagacgtgctgaggacacgagacccagtgcgttggaatcggattgttcaggagtatctgtgtaaattttatggaggcaaaagaaggggtgaaaatatgattttttatttttcatgggaggtaagtgaagaatttcattgggaatatgtgtgttgatggatgtactagttggaagaagtattttttatgttgttttttttgactttttagagttggatgggcaacagagagcgtagaatatagtggtaaagatttaacatgggcatattttagcgtattggaggagttagaagggtaaagtgtgatatgggtacaacagggagggtgtaataaaaaacaaagtatgttctttttgatgatattatatgcttgatgtggagatccagtggtgtttattatgaaataaaattatcaaagcgaaagacgcactggttgtggagaaataaataggtgaagttagtagagtgccaagttcaacagtgaatatctcgacaaccacgccagctagagacatgccttgtagatagttttgatcagcgtgttttactctctaggagcagtgtttaacatgggcataatggaaattggccaaaaccaaagttcatctggagagaagtggtttcatgggcaagttgactgggagtgcccagtggagctgtgcccagtgaagaggcccttcgtgggcaagcagacaaattgtgtgagtacttggctggaaattttggcaaagtgagaaaaatgcacagcgagggtgttcactggggagttgcccagtagacattttttcatgggcagctgccgggtagaaacccaatatgagaaatttcaaaatcactaagtcaggattctgagagtggtaggaggtacaagaggccagggagagtagagaacagagattggaattggaaaatccggcctgagaggggagttacggggggtgttggtattgttgcccagtgaagtgggaatttcgtgggaagtagactgtgagagttttgaattttttttaaattttgagattcgctgggaagattgaaagtttttgtcgggcaagtattacattccatgggcagtgcccagtgaaggaaaacacacatcaaaatttcctagtttctgtcctattgcttagttacaaagatatgttgatcaggatgctctgtatagtgtgccatgtaattatgaaggtgtaggaaggcatattgggcaagtttgcaaaatgggatttgttagaaatgcatgcacggctgacggctcagcagcattgacaaaaagaaaaacttcacctcgcgctcgaaaacattgcacgccaaaacgaagtccaatttaactcctggacgccgcggccaacgcgcgctgcgaatttttggcaagattacgcagtccgggggatatacatgagaaaagcacttaaaaaatgcggttcttagcggtgttgtgcaccgataggccaagatcccacggagagtatgcaggggcgtctacggacaagcttgggtatggccggggacaagagacgcaagtcttggacaggggcattgtggtcttgcgaccgtggtgcgcactgacggggccggtgggttgctagctgatagccagcggaccactaggtttattggggacggggttggagatgtagccgtgcaaacgtgacatctgggaccactctccactgaagcggacgaagctgtactttgtacaggggacctccgttgaagaaagtcaaacagtgctatgtgtaggttaatccaatcatcataacaaaactcatctgagcgtagttatctggttgatcctgccagtagtcatatgcttgtctcaaagattaagccatgcatgtctaagtataagcattatacggtgaaactgcgaatggctcattaaatcagttatcgtttatttgatagttccgttctacatggataaccgtggaaaatctagagctaatacatgcgtaaagccccgacttcgggaggggtgtatttattagataaaaaatcaatgccctcgggccttttgatgattcataataacttttcgaagctcatggcctttgtgctggagctggttcattcaaatttctgccctatcaactttcgatggtaggatagaggcctaccatggttttcacgggtaacggggaataagggttcgattccggagagggagcctgagaaacggctaccacatccaaggaaggcagcaggcgcgcaaattacccaatcctgacacagggaggtagtgacaatatataacgatacagggccattggtcttgtaattggaatgagtacaatgtaaataccttaacgaggaacaattggagggcaagtctggtgccagcagccgcggtaattccagctccaatagcgtatattaaagttgttgcagttaaaaagctcgtagttgaactttgggcctgggcgggcggtctacctatggtaagtactgttgcggccgggtcttttccttctggctaactcttcggagtgaaccaggacgattactttgaggaaattagagtgttcaaagcaggcctttgctcggatatattagcatggaataatagaataggacgttatggttctattttgttggtttctaggaccatcgtaatgattaatagggacggtcgggggcatcagtattcagttgtcagaggtgaaattcttggattaactgaagactaactactgcgaaagcatttgccaaggacgttttcattaatcaagaacgaaagttaggggatcgaagatgatcagataccgtcgtagtcttaaccataaactatgccgactagggatcgggtggcgcttcttgcccactcggcaccttacgagaaatcaaagtctttgggttctggggggagtatggttgcaaggctgaaacttaaaggaattgacggaagggcaccaccaggagtggagcctgcggcttaatttgactcaacacggggaaactcaccaggtccagacgtaataaggattgacaagctagagacttctcttgatcttacgggtggtggtgcatggccgtttttagtccttggagtgatttgtctgcttaattgcgataacggacgagaccttaacctgctaaatagggctgcgagcatctgctcgtgggctcttcttagagggactatgggtttcaaacccatggaagtttgaggcaacaacaggtctgtgatgcccttagacgttctgggccgcacgcgcgctacactgacggagccagcaagtatatccttggtcgagaggcccgggtaatctcgtgaaactccgtcgtgctggggatagagcattgtaatttttgctcttcaacgaggaattcctagtaagcgcaagtcatcagcttgcgttgattacgtccctgccctttgtacacaccgcccgtcgctactaccgattgaatggcttagtgaggctccaagattggcgccgcgggaggggcaactttcccatggcgctgaaaattcagtcaaacttggtcatttagaggtcgtaaaagtcgtaacaaggtttccgtaggtgaacctgcggaaggatcattactgtgatttatatcttatacacatgcgtgagcgcaccaaacacctaaaattgtaataataccagtcactaagttttaacaaaacaaaactttcaacaacggatctcttggttctcgcatcgatgaagagcgcagcgaaatgcgatacctagtgtgaattgcagccatcgtgaatcatcgagttcttgaacgcacattgcgccccatggtattccatggggcatgcctgtctgagcgtcgtttccttcttgcgcaagcagagttgagaacaggctatgcctttttcgaaatggaacgtcgtggacgaagtgaactaaattattggaacgctttggccgccgaacttttaactaagctcgacctcagatcaggtaggaatacccgctgaacttaagcatatcaataagcggaggaaaagaaaccaacagggattgcctcagtagcggcgagtgaagcggcaagagctcagatttgaaatctcacctagtgtgcgagttgtaaattgcaggttggagtctcgggttagacgtgtgtgcaagtcccttggaacagggtgccactgagggtgagagccccgtatcgtgcatgtcgacacctgtgaggcccttctgacgagtcgagttgtttgggaatgcagctctaagtgggtggtaaattccatctaaggctaaatattggcgagagaccgatagcgaacaagtactgtgaaggaaagatgaaaagcactttgaaaagagagtgaaacagcacgtgaaattgttgaaagggaagggtattgggctcgacatgggatttacgcatcgttgcctctcgtgggcggcgctctgggtttttcctgggccagcatcggttttcgttgcaggataaggacaattggaatgtggctcctcggagtgttatagccttttgtagatgctgcgtatggggaccgagggctgcggcggactcgtttcgtctcggatgctggcacaacggcgcaataccgcccgtcttgaaacatggaccaaggagtctaacgtctatgcgagtgtttgggtgtaaaacccgtacgcgtaatgaaagtgaacgtaggtcggaccgctctctcgggggcgggcacgatcgaccgatcctgatgtttatcggatggatttgagtaagagcatagctgttgggacccgaaagatggtgaactatgcctgaatagggtgaagccagaggaaactctggtggaggctcgtagcggttctgacgtgcaaatcgatcgtcgaatttgggtataggggcgaaagactaatcgaaccatctagtagctggttcctgccgaagtttccctcaggatagcagaagctcgtatcagttttatgaggtaaagcgaatgattagacgtctcggggtcgaaatgaccttagcgtattctcaaactttaaatatgtaagaagtccctgttgctttattgaacgcggacgtttgaatgcagagcttttagtgggccatttttggtaagcagaactggcgatgcgggatgaaccgaacgcaaagttaaggtgccggaatgcacgctcatcagacaccacaaaaggtgttagttcatccagacagccggacggtggccatggaagtcggaatccgctaaggagtgtgtaacaactcaccggccgaatgaactagccctgaaaatggatggcgctcaagcgtgttacctatactttgccgccatggcgtgatgccttggcgagtaggcaggcgtgggggtttgtgacgaagccttgggcgtgagcctgggtcgaacggcccctagtgcagatcttggtggtagtagcaaatattcaaatgagaactttgaagactgaagtggggaaaggttccgcgtcaacagcagttggacgcgggttagtcgatcctaagagatggggaagctccgtttcaacgtgtgcaattctttgcaccaccatcgaaagggaatccggttaaaattccggaacttggatgtggattcttcacggcaacgtaacagaatgcggagacgccggcgggagccctgggaggagttttcttttcttcttaacagcttatcaccctggaattggtttatccggagagggggtcttatggctggaagagcgtcgcctttgtttgcgacgtccggtgcgcttgcgacggtccttgaaaatccgcaggaaggaatagttttcacgccaagtcgtactcataaccgcagcaggtctccaaggttaacagcctctagttgatagaataatgtagataagggaagtcggcaaaatagatccgtaacttcgggataaggattggctctaagggttgggtggatgtgcttcctgtgctggccatgcgtgctggcgctgcttcttcgggggcggtgctgctagctacgcttgcgcttgcggcctccacggttaacaaccaacttagaactggtacggacaaggggaatctgactgtctaattaaaacatagcattgcgatggtcagaaagtgatgttgacgcaatgtgatttctgcccagtgctctgaatgtcaaagtgaagaaattcaaccaagcgcgggtaaacggcgggagtaactatgactctcttaaggtagccaaatgcctcgtcatctaattagtgacgcgcatgaatggattaacgagattcccactgtccctatctactatctagcgaaaccacagccaagggaacgggcttggcagaatcagcggggaaagaagaccctgttgagcttgactctagtttgacattgtgaaaagacatagagggtgtagcataagtgggagctccggcgccagtgaaataccactacctttatcgtttttttacttattcaatgaagcggagctggtcttgacgaccacgttctagtgcgaaggcatcttgtgtgccgatccgggttgatgacattgtcaggtggggagtttggctggggcggcacatctgttaaacgataacgcagatgtcctaagggggactcatggagaacagaaatctccagtagaacaaaagggtaaaagtccccttgattttgattttcagtgtgaatacaaaccatgaaagtgtggcctatcgatcctttagtccctcggaatttgaggctagaggtgccagaaaagttaccacagggataactggcttgtggcagtcaagcgctcatagcgacattgctttttgattcttcgatgtcggctcttcctatcataccgaagcagaattcggtaagcgttggattgttcacccactaatagggaacgtgagctgggtttagaccgtcgtgagacaggttagttttaccctactgatgaatgttgtcgcaatagtaattgaacttagtacgagaggaaccgttcattcagataattggtttttgcggctgtctgagcagacactgccgcgaagctaccatctgctggataatggctgaacgcctctaagtcagaatccatgctagaacgcgacgattacttgccctcgcacatttgagaaggataagaataaggcacttgtgtcgcagaaccgtagtaggtcggcagcggtgcgcgtggcggaaaggctgcgtgtgcttgccggcggatggcaatgtcaggatgcgcgaggataaatcctttgcatacgacttagatgtacaacggggtattgtaagcagtagagtagccttgttgttacgatctgctgagattaagcctctgttgtccgatttgttgcttcggcggcgaagttgcagtttgcagatgcgagctgggtatttcggcgagatttggggatgccggcgtggccgggtggtgggcgatgctgttgggtgccattaattcctagtccgtggcttggtgtatggtatacgtgaggacgggggtggtggatttgggtcgatcgtctgggtaggcatattttacctgttttggacttaggattttttcaaataatgtcagacgggatttatgcttacgtaagggaggagagtggtagggtagggattattgattacataaggagaatagctatgatgtcagaggagattaagacttatgattacgtagtgtagtgattacataagacgtacagtggcccgcggagattaagacttatgattacgtagtgtagtgattacttaagatgtacagtggagattagtatagacctgtagacttgtgcttagttaattaagacttgattactgaattagttatgaagtggtgagcgcaataacacgtgagatgactccagtgattcaatcacgtgaataagtagaagtcaagacacagagtcatattaaagaaccaaagagaagaagagtcagagggagttgactctggagaaagaatcacgtgcggacagaggggtttggggaaaaaagggctgggaacgtcccaaagaggcaagtgacgcacagaaattagggaaatatggtggtgaaaaattttcactgcacggctgtagcacgaaaattagtatgtagagacgcaacgacccgaaaaaagagctaaaaagtaaaaaacgcactttttggaaattattaagaaagtaatttattttacacctagaggtcaaaatatgggatttttgactaactttgaacgcttatatctggacaaccagagcaggtatgcactagtgtagggtatgggtgtgaagcctgaatttttgtgcgcatgtaggtatatgtagtgtgtagaatgactgcgggagtaagaagatagtaaacagaaggtgataacggacataaccaaaagacaacgaaagtggtgtcgtggcggcttggcgtggcggctcagcacactgatagcggctcagcagcgtacgataagaaaaaagtcgaggggctcgtgagaaaaaacaattttttcgactcgacgaaaagtggaaaaatgtggcggtggcgggtggcggtgcaggcagtagtggcgcatgcggtgcctgtggcgcagcggaaaattgggttcggaaaattggcgcgcgtggtgaaaagtgacgagcctccgcaaaattgggttcggaaatttgagaaatttttgaaagtgacgagcctccggaattttgggttcggaaatttggcgagaaattctgaaaaagatgagcctccgtaaaaaagtgacgagcctccgcaaaattgggttcggaaaattggcgagaaattctgaaaaagatgagcctccgtaaaaaagtgacgagcctccacgagagaaatgcgccgcaaaaaataatacgcaatacgccacaggaaaatacactactatgaaaaatactatgaaaaaaaaagattgcagcacctgagtttcgcatatggtctcccactacactactcggtcaggctcttagcagcttaactacagttgatcggacgggaaacggtgctttctgctagatatggccgcaaccgacagtgttcgatttcgggcggtattatggatgtcaaaatgaaaaaggccttttttctcgggctacagacgtgctgaggacacgagacccagtgcgttggaatcggattgttcaggagtatctgtgtaaattttatggaggcaaaagaaggggtgaaaatatgattttttatttttcatgggaggtaagtgaagaatttcattgggaatatgtgtgttgatggatgtactagttggaagaagtattttttatgttgttttttttgactttttagagttggatgggcaacagagagcgtagaatatagtggtaaagatttaacatgggcatattttagcgtattggaggagttagaagggtaaagtgtgatatgggtacaacagggagggtgtaataaaaaacaaagtatgttctttttgatgatattatatgcttgatgtggagatccagtggtgtttattatgaaataaaattatcaaagcgaaagacgcactggttgtggagaaataaataggtgaagttagtagagtgccaagttcaacagtgaatatctcgacaaccacgccagctagagacatgccttgtagatagttttgatcagcgtgttttactctctaggagcagtgtttaacatgggcataatggaaattggccaaaaccaaagttcatctggagagaagtggtttcatgggcaagttgactgggagtgcccagtggagctgtgcccagtgaagaggcccttcgtgggcaagcagacaaattgtgtgagtacttggctggaaattttggcaaagtgagaaaaatgcacagcgagggtgttcactggggagttgcccagtagacattttttcatgggcagctgccgggtagaaacccaatatgagaaatttcaaaatcactaagtcaggattctgagagtggtaggaggtacaagaggccagggagagtagagaacagagattggaattggaaaatccggcctgagaggggagttacggggggtgttggtattgttgcccagtgaagtgggaatttcgtgggaagtagactgtgagagttttgaattttttttaaattttgagattcgctgggaagattgaaagtttttgtcgggcaagtattacattccatgggcagtgcccagtgaaggaaaacacacatcaaaatttcctagtttctgtcctattgcttagttacaaagatatgttgatcaggatgctctgtatagtgtgccatgtaattatgaaggtgtaggaaggcatattgggcaagtttgcaaaatgggatttgttagaaatgcatgcacggctgacggctcagcagcattgacaaaaagaaaaacttcacctcgcgctcgaaaacattgcacgccaaaacgaagtccaatttaactcctggacgccgcggccaacgcgcgctgcgaatttttggcaagattacgcagtccgggggatatacatgagaaaagcacttaaaaaatgcggttcttagcggtgttgtgcaccgataggccaagatcccacggagagtatgcaggggcgtctacggacaagcttgggtatggccggggacaagagacgcaagtcttggacaggggcattgtggtcttgcgaccgtggtgcgcactgacggggccggtgggttgctagctgatagccagcggaccactaggtttattggggacggggttggagatgtagccgtgcaaacgtgacatctgggaccactctccactgaagcggacgaagctgtactttgtacaggggacctccgttgaagaaagtcaaacagtgctatgtgtaggttaatccaatcatcataacaaaactcatctgagcgtagttatctggttgatcctgccagtagtcatatgcttgtctcaaagattaagccatgcatgtctaagtataagcattatacggtgaaactgcgaatggctcattaaatcagttatcgtttatttgatagttccgttctacatggataaccgtggaaaatctagagctaatacatgcgtaaagccccgacttcgggaggggtgtatttattagataaaaaatcaatgccctcgggccttttgatgattcataataacttttcgaagctcatggcctttgtgctggagctggttcattcaaatttctgccctatcaactttcgatggtaggatagaggcctaccatggttttcacgggtaacggggaataagggttcgattccggagagggagcctgagaaacggctaccacatccaaggaaggcagcaggcgcgcaaattacccaatcctgacacagggaggtagtgacaatatataacgatacagggccattggtcttgtaattggaatgagtacaatgtaaataccttaacgaggaacaattggagggcaagtctggtgccagcagccgcggtaattccagctccaatagcgtatattaaagttgttgcagttaaaaagctcgtagttgaactttgggcctgggcgggcggtctacctatggtaagtactgttgcggccgggtcttttccttctggctaactcttcggagtgaaccaggacgattactttgaggaaattagagtgttcaaagcaggcctttgctcggatatattagcatggaataatagaataggacgttatggttctattttgttggtttctaggaccatcgtaatgattaatagggacggtcgggggcatcagtattcagttgtcagaggtgaaattcttggattaactgaagactaactactgcgaaagcatttgccaaggacgttttcattaatcaagaacgaaagttaggggatcgaagatgatcagataccgtcgtagtcttaaccataaactatgccgactagggatcgggtggcgcttcttgcccactcggcaccttacgagaaatcaaagtctttgggttctggggggagtatggttgcaaggctgaaacttaaaggaattgacggaagggcaccaccaggagtggagcctgcggcttaatttgactcaacacggggaaactcaccaggtccagacgtaataaggattgacaagctagagacttctcttgatcttacgggtggtggtgcatggccgtttttagtccttggagtgatttgtctgcttaattgcgataacggacgagaccttaacctgctaaatagggctgcgagcatctgctcgtgggctcttcttagagggactatgggtttcaaacccatggaagtttgaggcaacaacaggtctgtgatgcccttagacgttctgggccgcacgcgcgctacactgacggagccagcaagtatatccttggtcgagaggcccgggtaatctcgtgaaactccgtcgtgctggggatagagcattgtaatttttgctcttcaacgaggaattcctagtaagcgcaagtcatcagcttgcgttgattacgtccctgccctttgtacacaccgcccgtcgctactaccgattgaatggcttagtgaggctccaagattggcgccgcgggaggggcaactttcccatggcgctgaaaattcagtcaaacttggtcatttagaggtcgtaaaagtcgtaacaaggtttccgtaggtgaacctgcggaaggatcattactgtgatttatatcttatacacatgcgtgagcgcaccaaacacctaaaattgtaataataccagtcactaagttttaacaaaacaaaactttcaacaacggatctcttggttctcgcatcgatgaagagcgcagcgaaatgcgatacctagtgtgaattgcagccatcgtgaatcatcgagttcttgaacgcacattgcgccccatggtattccatggggcatgcctgtctgagcgtcgtttccttcttgcgcaagcagagttgagaacaggctatgcctttttcgaaatggaacgtcgtggacgaagtgaactaaattattggaacgctttggccgccgaacttttaactaagctcgacctcagatcaggtaggaatacccgctgaacttaagcatatcaataagcggaggaaaagaaaccaacagggattgcctcagtagcggcgagtgaagcggcaagagctcagatttgaaatctcacctagtgtgcgagttgtaaattgcaggttggagtctcgggttagacgtgtgtgcaagtcccttggaacagggtgccactgagggtgagagccccgtatcgtgcatgtcgacacctgtgaggcccttctgacgagtcgagttgtttgggaatgcagctctaagtgggtggtaaattccatctaaggctaaatattggcgagagaccgatagcgaacaagtactgtgaaggaaagatgaaaagcactttgaaaagagagtgaaacagcacgtgaaattgttgaaagggaagggtattgggctcgacatgggatttacgcatcgttgcctctcgtgggcggcgctctgggtttttcctgggccagcatcggttttcgttgcaggataaggacaattggaatgtggctcctcggagtgttatagccttttgtagatgctgcgtatggggaccgagggctgcggcggactcgtttcgtctcggatgctggcacaacggcgcaataccgcccgtcttgaaacatggaccaaggagtctaacgtctatgcgagtgtttgggtgtaaaacccgtacgcgtaatgaaagtgaacgtaggtcggaccgctctctcgggggcgggcacgatcgaccgatcctgatgtttatcggatggatttgagtaagagcatagctgttgggacccgaaagatggtgaactatgcctgaatagggtgaagccagaggaaactctggtggaggctcgtagcggttctgacgtgcaaatcgatcgtcgaatttgggtataggggcgaaagactaatcgaaccatctagtagctggttcctgccgaagtttccctcaggatagcagaagctcgtatcagttttatgaggtaaagcgaatgattagacgtctcggggtcgaaatgaccttagcgtattctcaaactttaaatatgtaagaagtccctgttgctttattgaacgcggacgtttgaatgcagagcttttagtgggccatttttggtaagcagaactggcgatgcgggatgaaccgaacgcaaagttaaggtgccggaatgcacgctcatcagacaccacaaaaggtgttagttcatccagacagccggacggtggccatggaagtcggaatccgctaaggagtgtgtaacaactcaccggccgaatgaactagccctgaaaatggatggcgctcaagcgtgttacctatactttgccgccatggcgtgatgccttggcgagtaggcaggcgtgggggtttgtgacgaagccttgggcgtgagcctgggtcgaacggcccctagtgcagatcttggtggtagtagcaaatattcaaatgagaactttgaagactgaagtggggaaaggttccgcgtcaacagcagttggacgcgggttagtcgatcctaagagatggggaagctccgtttcaacgtgtgcaattctttgcaccaccatcgaaagggaatccggttaaaattccggaacttggatgtggattcttcacggcaacgtaacagaatgcggagacgccggcgggagccctgggaggagtttcttttcttcttaacagcttatcaccctggaattggtttatccggagagggggtcttatggctggaagagcgtcgcctttgtttgcgacgtccggtgcgcttgcgacggtccttgaaaatccgcaggaaggaatagttttcacgccaagtcgtactcataaccgcagcaggtctccaaggttaacagcctctagttgatagaataatgtagataagggaagtcggcaaaatagatccgtaacttcgggataaggattggctctaagggttgggtggatgtgcttcctgtgctggccatgcgtgctggcgctgcttcttcgggggcggtgctgctagctacgcttgcgcttgcggcctccacggttaacaaccaacttagaactggtacggacaaggggaatctgactgtctaattaaaacatagcattgcgatggtcagaaagtgatgttgacgcaatgtgatttctgcccagtgctctgaatgtcaaagtgaagaaattcaaccaagcgcgggtaaacggcgggagtaactatgactctcttaaggtagccaaatgcctcgtcatctaattagtgacgcgcatgaatggattaacgagattcccactgtccctatctactatctagcgaaaccacagccaagggaacgggcttggcagaatcagcggggaaagaagaccctgttgagcttgactctagtttgacattgtgaaaagacatagagggtgtagcataagtgggagctccggcgccagtgaaataccactacctttatcgtttttttacttattcaatgaagcggagctggtcttgacgaccacgttctagtgcgaaggcatcttgtgtgccgatccgggttgatgacattgtcaggtggggagtttggctggggcggcacatctgttaaacgataacgcagatgtcctaagggggactcatggagaacagaaatctccagtagaacaaaagggtaaaagtccccttgattttgattttcagtgtgaatacaaaccatgaaagtgtggcctatcgatcctttagtccctcggaatttgaggctagaggtgccagaaaagttaccacagggataactggcttgtggcagtcaagcgctcatagcgacattgctttttgattcttcgatgtcggctcttcctatcataccgaagcagaattcggtaagcgttggattgttcacccactaatagggaacgtgagctgggtttagaccgtcgtgagacaggttagttttaccctactgatgaatgttgtcgcaatagtaattgaacttagtacgagaggaaccgttcattcagataattggtttttgcggctgtctgagcagacactgccgcgaagctaccatctgctggataatggctgaacgcctctaagtcagaatccatgctagaacgcgacgattacttgccctcgcacatttgagaaggataagaataaggcacttgtgtcgcagaaccgtagtaggtcggcagcggtgcgcgtggcggaaaggctgcgtgtgcttgccggcggatggcaatgtcaggatgcgcgaggataaatcctttgcatacgacttagatgtacaacggggtattgtaagcagtagagtagccttgttgttacgatctgctgagattaagcctctgttgtccgatttgttgcttcggcggcgaagttgcagtttgcagatgcgagctgggtatttcggcgagatttggggatgccggcgtggccgggtggtgggcgatgctgttgggtgccattaattcctagtccgtggcttggtgtatggtatacgtgaggacgggggtggtggatttgggtcgatcgtctgggtaggcatattttacctgttttggacttaggattttttcaaataatgtcagacgggatttatgcttacgtaagggaggagagtggtagggtagggattattgattacataaggagaatagctatgatgtcagaggagattaagacttatgattacgtagtgtagtgattacataagacgtacagtggcccgcggagattaagacttatgattacgtagtgtagtgattacttaagatgtacagtggagattagtatagacctgtagacttgtgcttagttaattaagacttgattactgaattagttatgaagtggtgagcgcaataacacgtgagatgactccagtgattcaatcacgtgaataagtagaagtcaagacacagagtcatattaaagaaccaaagagaagaagagtcagagggagttgactctggagaaagaatcacgtgcggacagaggggtttggggaaaaaagggctgggaacgtcccaaagaggcaagtgacgcacagaaattagggaaatatggtggtgaaaaattttcactgcacggctgtagcacgaaaattagtatgtagagacgcaacgacccgaaaaaagagctaaaaagtaaaaaacgcactttttggaaattattaagaaagtaatttattttacacctagaggtcaaaatatgggatttttgactaactttgaacgcttatatctggacaaccagagcaggtatgcactagtgtagggtatgggtgtgaagcctgaattt

SEQ ID NO: 20 - DNA, 41330 bp, Pichia kluyveri
  >NCYC246_000008F_mitochondrion P_kluyveri_NCYC246_TS
tctagttacttagaaagatgaagattataaaaaaaaagtaaaaagaaaataataatgaagaatataaaatcaatatatatatagaagaaaaaagatgagaatatatatagaagtcttaaccaaaattagtgccagcagttgcggctaaactaaggaggcgaacgttaatcattaatggcttaaaggatccgtagaatgatatattaaaaaatatattagagttaaatagaataattatgaaaaattatattgagagatgaaatgtgtggaaaataattagacaaataaacgtgaagataaaattaaaaatttaactgacattgagggatgaaggcatgagtagcaaaacggattagatacccgagtagttcatgcagtaaacgatgaatacttattgaaaaataaaagcgaaagcaaaagtattccgccaggagagtatagcttcaaagttgaaatccaagacaatagacggttacagttgtaggcagtggattgtgttttttaattcgataatccccgaaaatcttaccattatttgaatctcatataaaaaaatatatgatgacaaatgttacatcgttgtttaaagtctgtgctttaaggttatgattaacttcataaacagacgaaaatccgaatctataaaaaagaatatagataataatgaatttaattaaaaaaatacataataaaaggaactacaacaaatcctgatgactttaatatagtgggctaaagacgcaatacaaaattgataaagaaaaagaaaagatataaaaaaaataaataaagaaaagaaaatggaatatcaaatatacttatagaggtgtatataatgtggattaatctctgaaattcgagattatgaaaaaggaattgctagtaatcataattcattaagttatggtgaacttcctttctgtttcgtactaattactcatcattcgcttgaagtttatctaaatattaaaaatataatatatataatatttaatctataaaattggaaatattataaggtatcatatactcagttagaaaatgactagtgagaagttgaaatacagttatcgttgaggaatcagcggtgggtggtaaaaattaactaaaattatcatattattcataataaatatatataaatatatatatatataaaaataaaaataaaaataaaggtctatagtttaatggtaaaacagtagccttcaaagctatttttgagagttcaagtctttttagacctgtaaaaaaaaagagaaaaactaacctactataaagatagtaaagaaaaaaagagagaaaaaaaaagatgttatgttatgttatgttatgttatgttatgtaatgtaatgtaataaagataaaataagaaaaaatttataagagtataaaaagagaaaaagaaaaaaaatatgatagcttatagaaaaagccaaccatatataagtttagcaaatagctatttaatagattcacctcaaccaagttcattaaattattgatataatttaggaagtttattaggattatgtttagtaatacaaatagcttcaggaatattcttagcaatgcattattcatcacatatagaattagcatttgattcagtagaacatataatgagagatgtaaatttaggatgattaataagatatatacatgcaaatggtgcatcattcttctttggatgtatgtatatacatgtaggtaaagcattatattatggatcataccgtaaaccaagagtattagtatgaatagtaggagtaataatattaatagcaacaatggcaacaggatttatgggatattgtttagtttatggacaaatgtcacattgaggagctacagttataactaacttattatcagctataccatttataggagctgatatagtaccgttaatttagttaatcctttttttaataacataatattatataatatataatataaaaacaaaaaaaaagaatgagcggctttaaatcgtaagatttattgaaaaagagagtgaattgtcaaggaactctaaggtatatttaatatatatactatgataacttgcagcgaagtattttctatatgtataaaggaaaataaacgttcaacgactagaaagtgagtaatataacaataatctttccaagagagctctccaacctatactatactatactatactatagatataaatatatataggttgatgacatagtctaatttatttagaaataaataataaatattaataaaatgaatataaaatgttatttttaagtcatatgaggaggattctcagtaagtaacccaacaatacaaagattctttgcattacattacttattaccatttgtattagcagcattagtagtattacatttaatagctttacatgtacatggatcatcaaacccaataggtataacaggaaatatggatagattaagtatgcacccatactttatatttaaagatgcaataacagtatttgtattcttaatattattctgtttctttgtattcttctcacctaatacattaggacatccagataactatatccccggtaatccattggttacaccggcctctattgtacctgaatgatatttattaccattctatgcaatattacgttcaataccagataaactaggtggagtattagcaatgtttggagcattattaatattattaatattaccaataacagatagaagtttatatagaggattagcatttaaaccaatatctaaattcttcttctgattatttgtatttaactttatattattaggaaacttaggacaattacatgtagaagtaccatttatacaattaggtgtaaattgtacagctttctactttgcttatttcttaataatagttccagcaatatcaacattagaaaatgtattattctatttaggtagaataaataaataattataatatatcttaaatataatataatataaataattataatatcatttataattataaataaataaataaataaatatatataaatatatatatatatatatcagaggatggtatatgtaaaaatatacgggtaaagtggggtgaaaaaaaaaaataaaaaaaataaaatgttagcaataacaataataatatttgtagtattaacaagtataatagaaaaaaacaacgaatgtaaaaaatgattaaaaagagtatgtttattaagtttagtaaatgtattattaataaatataaatataaatacaacagagatgttagtattagggaactcattatataatagtttattatatatagatagtttatcaaattatatgatgaatttaatattattagtagggataatatatatgttattattatcatgtaatataacaacaataaaagtattagatcatataatacaagtaaaagaatcattaggattattaatattatttaatatattaggattaatattattaatattagtaaatgatttaatggtattatttatagtaatagaattacaatcatattcattatatttaataacatcagcatataatacatcaagtaatagtgtaaaaagtggattatattactttatagtaggtagtataggatcatttataatattagatggtacagtatcaatatatgaagaaataggattaacaaatatagaattaatatcattatgtataaataatataaatatatatgatatattaataatattattaggattatttataaaagtaggattagctccattttatagttattcaatagtaatatatacattagcaccaacaatagtaacatattatataagtttattaccaaaattaagtatattaacattaatattaagtttagtaagtatagtaaatttagtagaaacagaaagtagtagtaatataataaatataataagctttataatattaatatcaatgataataggatcaataggtggagtaaatgtaataagaataaaaacattattagcttatagtagtttattaaatgtaagttatatgttattagcaataatagcaagtaatggatactcatatataggatatttattctatatattacaatattcaataactcatataaatacatttagtataatattattattaccaatatatagtcatataaatatattaaaaggagaaagtaaaggtgaagtaggaaaatatgatgtaatgttaagtaaatactcaccaatagaatatataagtcaatttagagtattattaaataaaaatagttatttatgtatagctttatgtatatcattcttctcattaataggaataccacctctaagtggattctatggaaaattattagtatttataagtgcattaggtaatggatatatattcttatcaatattattagtaatagcaagttcaatatcagcttattattatggtagtgtaataaaagaattatgttttgatatattaaataattataatttatataactataaagatgtatcagtatataatgaatcattattaagtaaaatggaaaatgtatatataacattaaaagataaagtaataagtaaagatggaaataatttattattaatgaataataatataagttatcaaataagtttaatgacattagtaatattattaatactatttgaatataataacataataagaggaacatttatagtaactttaaatatgatttaatatgtttcaagatatctttaattgatttttaatagtagtaggattattaggtttaatattaataatagttaactatttattagtagaaagtagtaaaatggatgaaaatgtaggtaatagtactgattatatagaaaaaagtaatccttttgaatgtggatttgatagttttaaacaaagtaataacccagtacctatcccatttatattaatagctttattattcttaccttttgatttagaagtatcttcaatgttaccttatataatatctagttatatagtaggtaatttcggattaatattctttatattattcttattaatattagttgttggttttgtttatgaattaggttcaaatgcaatatcattagttagattaataaatacttcaagtagatcatcaaaatttgatgtatataactatataaaaaatataaataaaaaataaataaaatatatatatatatatatatatatatatatatatttaatatatataataatataatatatttataaaaaataaagggtaaaaagatattaattagtataaaaaaagaggaaaagaatgtgagatagttagttaaagtaaaataatatatataaggagatattaatggaataagataagtaataagaattatatataataaaaagaaatgcataaaaatgcagaaccaattaagatttggagattatgtaaatagatgattatttagtacaaatgctaaagatatagcagtattatactttatattctcattattctgtggaatattgggatcatttatgtcattagtattaagattagaattagcagcaccaggaaaccaattattaatgggaaaccatcaattatttaatgtaatcgtgacagcgcacgccgtgttaatgggtgtgaggggagtctcatataaaggtagtagtatatcattggatagaactattacattcttagtattatgtataaaagcgattagggcatgacgtgtcaaactcgtcggagtaatccaaagtgctaagcctaattgaaaggatacggttgtagagttttctagaaacaaatctgaattaagacgtgtcatgactacgataagaaacttgatactggtaggttatcattcacgggatactaattgtttagaattaggatatcatatgcatagtaataccattagtgctttgcaaactaagtatgatagaaccacttcggaaagaagatatatagccagcaagagtctaaagccgtcacataaccttgtatgaggaacacctttaagatccttagaaactaataaggattgaggagcttcttgaagtaaaccaaatcttagattcggaattacgttggaagcagcgattataaataggtcatatagcacttctgtaaaatccaaaagagtcactggagtggtgcctaacatcgttgatattgccaaattaaataatttagtagtagcttacgaaagcataaagagtaaacccggaaatatgaccgagggaagcaatgaagcaacccttgatggaatcagcataggttgattgagaaaaatatcagaacaattattggagggaaaatttaagtttagtccagggagactagttaaaatcccgaaacctggtaaatcagagaaaagaaatttgatcattgcggatcctagagagaaagttgtacagaaagctatagaaattatactgaatggttattatgacccaatgatgagtgataatagtcatgggtttagacccggtaaaggagtacaatcgtgtattagaaagatagaacaggatttccaaagttctagatttgtaattgagggtgacctaagaaaagcctttgacagtataccgcacgataaactcctcgatgtattgaagaaggatatcaaatgtgttaaaactttagaactaattaagaatatgattaaggctggttataaggatggggataagataataaaatcacaagtaggggtaccccaaggtagcgttttgagcccgctactgtgtaacatttatctggatgctttggatagacacattgatattttgaaagaaagatatgatgtagctggaagaagtaaaaagaatccagaatataacaaattgtctaatagagcaagttatataagaaagaaaggattattagtacaagaagcatacaaaacagaatataagaatattatgtgaaaaatgttaagaacacctagtaaatccttagataaaattaagattagctatgtcaggtatgcagatgacttcataattggagtagaaggccctatgtctttagctaaagatattaaggaggagatcagaatattattagaaggtttaggtttaacattaaacatcgacaaaacaaaaataacagattttgaacaggataatatagtctttttaggttataagataagaagtcaagagaaaaacgagaaaatgttcgaagtcctatatgatgagaagttgaagagaaagattacaagaagaaagaaagttagattaagctttgaattcgattacaagaaaattctgggtaaattagcagaagcaaaatttattagattaagaaccaaacagaaggagaatgacacgaacaatctaatttttagaggtacttttaggggaaacttagtgaacctagatcactccgacattttaatttattacaattcggtagtaagaggtatatataattattattgtatatgcaggaaccacggtaatctttttaacattttatgacttttaaaggaatcctgcgctttaactctagctagaaaatttaaactaagaaccatgaaaaaggtgtttaaaaaatttggaaaggacttgtccttcagaaaaatagtagagattaagggtaaagcttacgaaaggaaatacagttttttcgagccagtaaatactaaaagagttgccataaagaactgaagtagtagattagatgaagaagaattacaaggattaataagaaagaactgaaattcaaaattaaccagatcaaatttatgagagaattgtgccatatgtagtacagataaagatgttgaaatgcatcatgttagatctattagagatttaagagaccctaaggggaataataaagactgatttactagagctatgaatggtattaacagaaaacaaataccactttgtagaacgcatcatatgaagttgcaccataataaactggatgtatttgagactacttgttttaataattatataaataaaaagaaacaagtacatatagaagagtttacaaaatatgctaagaaaaaattaattcccttaaaaaaaggataatgtttaaacggattttttcaggcagaaatatttataatcggggagagccgtaaaaacacagaaaaagtaatataagtttaagatattacgtgtaatgatgggaaactatcacgttcggttcggatgccggcggataattaaaaaaagtaatgattatttaggccgagcatactattctttttaataatgccagtaacaatgggattctttggtaaagaaataaaaagaatgataatgatagatagtaataattattataaaaataaaatccccgcccgtacttcgtgtagggtagacaaatgaggtccatatttagcaggattaatagaaggggatggaacgatagtagtatcaaatgaaataaaaaaattaaaaaatagtccaattatagagatagtgtttaataaaaaagatttagaattagctaaatatttatataatttattaaaaataggaaaaataaaagaattatcttcagaacataaatatgtattatgaagaatatcaaaaatagaagatgtttatatactaataaatataataaatggttattttagaacacctaaatatgaagcattagtaagagctataaattgaataaataattatataacaataaataaaataaagtacccacccattctaacacatagtgtggggcagggggaattaaatgagagtaatagtttagaattactgaataaaaaaaagatagaatcaatacttgataatataaattatttaccagttttagatatagataaatcagaaataaatacaaatggatgattatcaggatttacagatgcagacgggaattttgaaatagaattattgaaaaatagtaaaagacataaatctagagtaaatttaagttatatattagagattagacaagattatattataaataatataattaatgatgaaaataatagttatagtgaaataatgatgaaaatagcgaaattgtttaattcaaaagtatatagtagagagagagatttaaaattaaagaatcaagtatccgcccacactttgtgtggggtagaaaaagagtataaaaaaatacgtagatcatatataatatcagtgaatagtaaattaaatttattaaaagtaaaagagtattttaatacatatccattattatcatcaaaatatttagattataaagattgagaaagtatattaaatttaatagatagtaagaattcatttacagatgctttaatattagataggagtaaagaaataaaaagaaattttaatagtactagagtttttgcaacttttgatcatttaaataataattattacaattcttaaattattataaataataattgccgttatatgttgtgaaatatataattatgacatcactatatgctggaaactcctaaagctttatttaatattaaataatatgtataatatatagaatatatatggtttatataatataagatttaatgattaaaaataagtaaagatgtaacaatggacaatcagcaggaaaccaaagtatatatgaaagataatatatgagtaggatcctcagagactatacgtgatgaatctaaataaaaatagattaagagatagtccaaatttattagaaataataaaacaaaaagaattatttagtaccattaatgatcggagcaagtgatatgtcatttgcacgtttaaacaatataagtttctgattattaccaccagctttagtttgtttagtagctagtgctttaatagaaaatggaccaggaacaggatgaacagtatatccaccattatcagcaatacaatcacatagtgggcctagtgtagatttagccatattctcattacacctaacatcaatatcatcattattaggagctataaactttataactacaatatttaatatgagaacattaggaatgacaatgagtaaattaccattatttgtatgatcagtattatttacagcaatattattagtaatgacattgcctgtattatcagctaaccttaaaaaaatactggctgattgaaatcatactatatgctggaaactcttaatatatttagtattaataaagatattaataataaaagaattaagacaatcagcaggaaatctacaaactttgcaagtttgtattaataaatgaataaatttattaacaataaagaatttattggagatcctcagagactatacgtatgagtttatttgttttttcttaaaaaaagaaaaagagtataaaaaagaaatgatcttaataaataagggagtcgaattagaagagaattcaaaatttataggagaaaaagatttagaaatattaaatgaaatagataaagagaaattatcatcaaatcaattaggatattatttagcaggattaatagaagggaatggatcaataataataccaacgagtattcgttcaaaaaaaaaagtattaaattatccatcaattcaaatagtatttaaaaataaagattatccattagcttattcaattatgaatgaattaggagtaggatttatagtaagcaagaaaggaacaaatacttatgtttatataataaatacttatgtagggataataaaggtagtaaatttaataaatggaaaattaagaactaataaaaataaaagattatgattattaatagattgattaaataatatagatctagataattatatattattaaaaaatggaaaattattactacagaaaataataaaaaaagaggtagatagatcagatatattaagtaatgcttgattatcaggtatattagaagcagatagtaatttttatgtagcacatagaaaaataaaagatacaagtgattataatactagtgtttatatgagatttagtcaagcgaaattaaataattgaggagatgataataaagaaataatggagataataggtaaagctttaaatataaaggtaaagttagtagaacgtgataaaaaagtaaaaagaagttcagaatataatattagaactacaaattataaaagtaatagtatattagtaaattatctaagtaattatcctttatttagttcaaagtatttagattataaagattgaagtttagtttataatttatatactccaagattaaatcatacaccttcaaatataaaaataataaaatgagtaagagagaatattaatgatagtagaacttattttaattgagatcatttaaaaaatttttatacttattaataaataagatatagtcccaacaattacgtgagtagttgagtattaacatatataatttttttatatataaattattttatatatataatataaagtataaatattaatttatataaatatatatagggtaattatgattgaaagatcgttaatcaagataaagggtataacattattattaatggatagaaactttaatacatcattctatgaatcagcaggagggggagacccagttctataccaacatttattcttaggagtagaaaatataatgaatatattattattgatatacattttaaaaataaatagtaaaataaatgataaaaaagatataaaagacatagagaatataagaaatataagattagaaagaactataagagatttagatatatttaatgaaaaatttaaagaattaaaaccgaataataaattaccaagtagagaatttttagaatgatttataggaaattttgaaggaggtggaaaatttataatagctaaaagaggagatataaagatatgtattactcaatcatttaaagataagcaggaacagcctgaggtattagaattaataaaaaatactttatgtatgggagcaataaataaagaatcaaataaaagtcaaacatatagttgagatgtatataaaaaaagagatatatatttattatgtttattattaaatggaaatttagtgatacctacaaggtatttaaaatttgtaatatttttatcaaaattaaatgaatcattattaaaaaataatgaagatataatatttatacaaaataaattaaaattaccatcattagaagatggttgattatcaggatttacagatgcagtaggatgttttacagcattaaaaaatacatcaacatatagattaaaatatatattagcacaaaaaggaaatataaataaatatgttttagattatatattagaattatttaatagtttaaataaaggatcaaaagtaggttctgtagtagttaataatttaagtaatgatgtatttgaaatgcatatattaggattaaaaaatataataatatttgattattttaataagtataaattattatctaaaaaacgtaatagttatgaaaaatttaaagatgtaactatgtgtatattgaataaagatcatttaaatgaaaaaaaataggaataaaaataaaaatgtaaagatataataatattataaaataatataagattgggaataaaggatatgatttaacttaagttatgtaaaaatataaaacaatgttgtaaaaaaaaaagaattttatattaaatattatggatataatatatcatattctagttttatttattaaaaataaaaaaataaagcgacattgatggtacggtcaacaattactcagatatagaccgtcggttatgtatatatataaatacaaatgtatgtatagtatgtatatatgattgctacagactgcttcatcgatgggtaatatatataaagatattgcttaatgtacagtcggaatctcaatatatagttagtatgtatatatattggtcatagagttaatatgaggtatatattataggagtgaaaaaataatatatattaagatttggattctttggacatccagaggtaaaaataataagcctcttaatattacagtatgctggaaagtctataaagatatttaattactccattcaatatccaaaattattaaaaggatataggaacatagtaaaaaaattaaatatatgagataatcagcaggaaaccaaagtatattgaaataaagatatatgagtaggatcctcagagactatacgtaataataaaagtatatattttttagaaagaatatcaccccatataccaaaacataaaaaattattaaatgatacagaattaggatattatttagcaggattaatagatggaaatggaaatattgataaagagattggaagaattactatatattatgatataaaagatatatcttcagcttatatgttaaaagaaatgataggatatggaagtattttaaaaataaaaaatggagtgaaatatgtaatatcaaataatgaagggatcttaagagtaataacattagtaaatggaaaattaaaattaaaatataatcaagtaatagaaaatgttttaacaaaaaaccaattagtaaattataaatgaaatgaaatagaatttaaaaaaggtgatataaaagattttaataattattgattaacaggatttatagattcaaatggtagttttcaaataaagattttaaataaattaggacaaaaattacctgaaataaaattaaaattacaaataagtgaagtccccacccgtacttcgtatggggtagaaaatagagaaatactagaagaaataagaaaatttataataaatattaataatgataaaataataacagttagaggaggaggaattaatataggaataagaaaacatatattagactcaggggaaacatcattaagttattattgagaaacatcatcatttagaactataaagaatgtaatatgttatttaaataaatatcctttacaatcatcatataaatatataaattatttatacttatataaagcttatttattagtacaaaataaagagcatttatcaatagaaggggtagagaaaataaaaaaatataaaaaaaatatgagataagatataaaaaagaaaaagaatatacttttataagatctagtccaaacaagaatataatcaagtttttgtaaataattataataataaataattatttagttaatatatataaaagataaaaaaatagatatatatattaatcaatgtaaagttatatattaatattaccaggattcggaatagtatcacatgtagtaagtacttactctaaaaaaccagtatttggtagtttaggaatggtatacgccatgggatcaataggtttcttaggattattagtttgaagtcaccatatgtatgttgtaggattagatgtagatagtagagcatactttacatcagctacgatggtaatagccgtaccaacaggtataaaaatattctcatgattagctacattatatggaggatcaataagatttactacaccaatgttatatgcagtagcattcatatttatcttcacagtaggaggtttatcaggagttttattatcaaacgcaagtttagatatagcattccatgatacatattatgtaataggtcgaaagatggccctatataactctattaaaaatatcgatagtagttatatcgaaattgactatatgcggggaagtatattattaagttcttatttacttttatttatatgatgatgttatcttttaaaaaaaatagatggagagaatttaaaaaatataataattttaaattacaataataaaagtaaaaataataatgaatgtagtattttaaaacaaaatatgaatatattatccgcagaaaacaaaaataaagttttaaaaaaaaatagaactttagaattaggattctcagagactatacgtcaatcatataatttagaagaagatataaatagtctaaataaagaatctgaagtacatgaaaaactagaaaaaagaaataaagtgtattcagaagaagaaagtatattatcaaattcaaaattattacaaaaaaataaatgatgagaagataaaaattttttacattgatttgcgggagtaatagatggagatggtaatatacaagtaaagactataaatggtataaaaaaattaacaagaatagaaataaaaatacacaatcgtgatataagattattaacaaggatattaaataaattacatttaggaaggatttatagaaataaaaataatcaatattcaaaatgaatagtttcaagtacaaaagaaatggaagaagtattaattcatataaatgggttaataagattaaaagtaccatatttaaaagatggttgtacaagtttaggaataaaatataaagaagcagattatacaataaaagaaaatgatccatatttatcaggattaatagatacagatggaagtatagtatttaattatactggaaatagaatagaatgtaatttagaattaaaatataatgaatatagtagtaaattaaatatagatgaaactataaaaaattataagcctacaaaattaatgagaaaagaatcattaagattaaataaaaaatataaatcaataatatttagttatcaaacagtatcaggtatgatttatttatatagatattttatgaaaaataggttatattcagattttaaattttatagaatatcaaaaatattacgttttatagaaatacgtagatataataaatatgactataatagtgaggaatttttaatttattcagagtttttattagattgaataaaatatttaaatccgaaatatgataatataccatttgtttctaaattaaggatgaagagatagtccacataagtatatatataaatataaaattataaataataattaaaataatgtttatatagatagtatatatatatacttaaaagcatttccattatgtattatcattaggagcattatttgcaatattctcaggatattactattgatcaccaatggtaacaggtttatactttaataatgtattatcaaaaatacaattctgattattctttataggagctaatgtaacattcttaccaatgcacttcttaggaatgaatggtatgccaagaagaataccagattatccagatgcttttgcaggatttaatgcaatatgttcatttggagcagtattatcaatagtatcattattattctttggatatgtaatatatgatcaattagtaaatggtttagttaataaagatttaagtactaactcattattaaaagatccagatttctttgaaagtaatgaaacatttaaatcaaatgaagttaaatcagaatcaatagaattcttattaaactacccacctatgttccatacatttaacactgtagcaatacaatcataggtttaattaaatttattaatataaatatatattaataataatcattaattaaatatataaaaatatatatatatatatatatatatataaagaaagtataaagagataattaattaatttatgaattaatttatataataatataaaagagagaatttatttatttattcgcccccccgcactccgtgcggggggacggtggataaaagtaccttaaaaaataaggtgagagagagatgagaaaatcataaagattatgagagatatatgtatattttttataagaaaaaaagaaagagaaagaaatgtcaatgatatttataaattcaccattagaacaatttaaaataaacacttttgtatcattatcatcaccgatattagatttaagtgcaataaatgtaacaacatttagtttatatataggattagtagtattatcaatattaatagtattaggattaggattagatagaaaattaatagtaggatcaaactgattaatagcaatagaagcaacagtagatacaatagtaaatatggtaaaaggacaaataggaggaacaatatatggaagatacgtaccattaatatatacattatttgtatttatattagtagcaaacttaataggtatgataccatataactttgcaatagcaacaagtatagtatttataatatcaatatcattaagtttatgaataggtttaacaatattaggattatacttacataatatagtattcttcagtttatttgtaccagtaggaacaccattagctttagtaccattactagtattaatagaattattatcatattcagcaagagcagtatcattaggattaagattagcagctaatacattatcaggtcatttattaatgagtatattaggtaatttagtaaaaacattcatgggaataagtaaattaacattcataataggtttattaccaatagcaggaatattcgcaatagtaatattagaattcgctatagcttgtatccaagcttatgtatttgctatattaacatcatcatatttaaaagatagtttattcttacattagatatatatgtataatatacataaaaatatataaatatataaatataaataaatatatatatatatatatatgatacattaaaatatataagtaaatatataaataatctaatctaatatgatagtattaaaaatataatattatataatataaaataatatatgataagataagatagataagagatgagatgataagagatgagaaaataaatatttataaaaaatatatttatataaaatataaaaaataaaaaaaagtatataataatataaataagatataaataaataaattgaaaaatatatgtgtgaattaaataaaaaagatgaatttattaatataagagctacttacataagggtaaacaataatatatgataaatatattgagacctaaaggaaactgagagaaaagaaccaagggaactgaaacatctaagtaccttgaggaaaagaaataaacatagattctatgaatattggtgagagaaaatagagaagtataaataagtagtaggaaaaagaaatctacgaagattggagaactaatccaaagactaaataatgtaagtaagtgtaataagtaccgaaagggaataatattaataagtgaaattgagagcaattaaaggttaataaaaaagaattaattaataatgtaccttttgtataatgggttagcaagttataataaatagcgaaaataagaaagatttagaatgaaaatgaaaagaagttattaattatagacccgaaagtagatgatcttaccgtatacaagtggttaagatataataaatatgtaatgtatagattatattaaacgactgaacaggttaatgttgcaatattatctgaagatatatggtaagtagtgaaagacaaatctgatctacagatagctggttctttgtgaaatatattttagtatagcgttaataagtaatgtattaatatggtaaagcaattaataataattggggtattgtaataatattatcaatataatttaatctcagaataatattaatatgaaaattaaacgtcagactgttagtgataagattggcagtcaaaagggaaacagcccagatcaataaagaaagttccaaataataatttaagtataaataatatttattaatcgtaaaacaataatgggattagtttgacagtaattattctatgatcaacgtgtaacaacgggtttattaaaggaaaggatgagcaatcattctggtcgattaatagatagataataatcggagttaaaaattataactgaattattgaataatatataaaaaaaaagaatttataaattatggtaacaaagcatttaatgaatagaatataataaaaaaataattattataaaaaagagaatatatagatatatattatttataatatataaatgtatagaaaaaagaaaaaaagagatagaattaaatagagaatgctgacatgagtaacgaataagaggtaaaatcctcttcactttatgcattaggttttaataaaaaatcggtccataaggtttattctgaaaagaataaattaataggtaataaataaaataatataagcccatataaaaaaataaaagattatgtatggtacaggaaaaaatattataagaaagataccgtaataagaccgacacaggtatgcgaattataaatgaaagtgaataagttaattatagtaaatgaactcggcaaaataaaagctctgacgctagtcaaaaagagtgaataaagaacatgttatgcgactgtttaccaaaaacacagcactttgcgaaaacgataagttttagaataaagtgtgaattctgcccaatgtttaataataaagaaatatattaaaagatgtatttataaaaattaagtaaatggcggctttatactgagagtcataatgtagcgaaattccttgactactaattatagtcctgcatgaatggagtaacgatgtaacaactgtatctactataagcttagtgaaattgaaatcgctgtgaagatgcagtgtacctaaaggtagacgagagtgcgactagattaattgtttaataataatgtggtgagaatccacctaataatccattatttgagctcaatacaacatgcatgagaagtaatttttgtgtgtgaagcttgtatttttatgtcactattatttgccatccatctatctataaaaatataggaaggtaaatgagctagattactatgaataggatgacgaattcatgtaaaagcgtagaatgaaaattctcattattgatagtagaaagaagttctcgattctttcttaatggatcacatttaatatatcatctaaaataaaaatatattaaataatcaataaacgtatagtgaaattctaaggtaatcgtaaaagtattattaaataaactaggtaagcccaatattatccatttattaattaaaaaataagtggaagttaaattgtaaaatttaatatgtaatagtgggtaaaggatttcttaaaaagtgaatgctttatggtaataataaagatagaatcaaatgatttaattcgaaagaatactgacttaagaaaagtgtaatataataatattatgcgcgagctgtatgcgatgaaagttgcacgtacagttctacgagggggaaaatttagtaataaatcgacctatctcaacagaccctatgcagctttactatgatttaataagttgttattatttgataaattattagtatataaagaaatatatagatatgcaaatgaaatacttttattttattcagtttcaatatttaaatattgaaatataaataataactaaattaagaaaagattagtggaaattatcctaatcaaagtatcaaaacatatttattagtaaaataatagatatagatatatattaatgacagctttaaattgatagtttaaatggggcgttgatttcacaaaaaataactgaatatgtccatatacaattaaaatataaattaaaaaaatgaattaatgaattaatcattaaaaatgttaaaaataataagaatttattataaatttagaaaaacctatgtacagtaaatttgacctgacatcaaatattcgaacaaaaaatcgaaataaaattaatataatagtggataactgtgcaataatttaacactaacaagtggaaattctacgtaagtaaggtataatgaacagatcattttaatagtccaagtgatcgattaacggataaaagttacgctagggataacagtgtaataacatgagagagtagatattgtcaatgttgtttgccacctcgataaaataaataaataaatgagtagatgtcgagtataaattgggtgaattgtcaaggaactctaaggtatatttaatatatatactatgataacttgcagcgaagtattttctatatgtataaaggaaaataaacgttcaacgactagaaagtgagtaatataacaataatctttccaagagtgcccgagaaaaaaatgattaaattttttttaagacatagtctgaacaattatgaaaataattgaaatagatatgaataaatctatctataaaacaaaaaaatggtcgactcagcctatcctattggtagtataagctaataagggtttgactgttcgtcaattaaaaggctacgtgagttgggttcaatacgtcgtgagacagtatggtttctatcttctttaggggttagttaaaaaaggtatataacttagtacgaaaggattagttatagttaatcaatgattttactgttgtatattatagtgtagtaatacacaaattatgaaataatcaaaagttaatatgcaggcagttaagttaaattaataatatttaaatattgaaagcatttaaaatataaaagtaactttttttttaactatataattatatatgtatataccatatatacatatataaatcttatattatgttagaatagcatgtattatagtattatattagaaataataggttataataaaaactaaatatgtaaaagtatttgggtactaattaatataagtagtttaatttacattctatttatttattaaatatcttatttataaaaattaattaataaattaattaataaaaaatatgtaataaaatatgtaactatatttatgaaaaaattcattcattcatataaatgaataaaaaaatatgtaataaaaaatatgttataatggcataattggtattgcgtttgttttgtaatcaaaagactttaggttcgagtcctaattataacaaaatattaataaaaattatgaatttatttataaattaaatcgccccccccccgcacacgggggggggacgaggaatgaatataagtaataaatatatactaaaaatgaaatagtatagacataaaaagaagagtaaagagagaaagaaatctattaaagatatgtagagagatataagagatagataaaaaagaaaagagagaaaaagatgagtataaaatcaagatcaaatttacaattattcccatttcatttagtggcaccttcaccatgaccaataatgatatcatttgcattattatcatttatgttaacatttgcattaacaatgcatggatatataggatcattattatgattaggattagcagcatcagtagtattagcaacaatatttttatgaactagagatatagtagtagaaggaacatacttaggagatcatacaatagcagtaagaagaggattaaacttaggattcttattatttgtaggatcagaagtatttatatttgtatcattattctgagcatacttccattcagcaatgggaccaacaatagaaataggagcaacatgacctccagtaggaataacatcaataaaaccaacagaattaccattattaaatacaataatattattagcaagtggagcaacagtaacatgagctcatcatgcaatattatcaaaagatagaaatggaacattattaggtttattaataacaacaatattaatagtattattcgtattatgtcaaatatgtgaatatacttttgcaacattcacaatagctgatagtgtttacggttcagtattctatgcagcaacaggtttacattttatacatatggtaatgttagcaatgatgttatcagtatgttatgctagaatgtatttataccactttacttcaacacatcatttaaacttagaaacaactatattatacttacatgtattagatataatctgattattcttatatatagtattctattgatgaggatgttaatattaatcttcttatataattataataatatttttaatataatatatataaaggtaggttaaggttaattaaaaaatatatgtatatatatatatatatatataaagtataatgaaattatataataatataaaataaaagagaagtagaagcgaatttaagtcaattggctagacaatctgttttccacacagaaaatgagggttcaaatccctcaattcgtaaaaagcatgatagtgtaattggtaaacataatagcctcatgagctattgattcatgttcaaatcgtgattgtgcacaaaaaagaaaagggggagataaagattgaattattgcttaatggttaaagcatttcactcataatgaaacaatctaagttcgattcttagtaattcaaaataaaaaataagataatagaaatgaaagattatacttaaaagtcccgcaccaggtgcgggggcagaataattaatatgagcgagataaaaaaaatagaaaataaaatgtttataaataagatatttaatgatgtaccaacaccatgaggagtattcttccaagattcagcaacaccaaatatggaaggaataatagaattacataacaatatatttttttacttatgtataatattaggattagtatcatacatatttttaaatgtaataacagtatataacaattcaaaaatagcatataaatatatgaaccacggacaatttatagaaatagtatgaacaacattcccagctgtaatattattaataatagcattcccaagtttcatattattatatatatgtgatgaagtaatagcaccagcaatgacaataaaagcaataggattacaatgatattgaaaatatgagtactcagatttcataaatgaaaaaggagaaacaatagaatttgaatcatatatagtacctgaagatttattagaagaaggacaattacgtatgttagatgtagatgcttcagtagtatgtccagtagatactcatataagatttatagtaacatcagcagatgtaatacatgatttctgtataccatcattaggagttaaagtagatgcttcacctggtcgtttaaaccaaacatcagctttaatacaaagagaaggagtttattatggacaatgttcagaattatgtggagtaatgcactcagctatgcctataaaaatagaagcagtatcattaggagaattcttatcatgaatagatgaacaataaattaattaatctatttagttatgctatgctatttttatatttactataaaagtatacatataattatatttatataatatgatatagatctttaataataatataaataattaaaaaaataatatatatatatatatatatatacaatatatataatattataaataaaataataaaaaaaatatatataataatatatataaaaatatataaaaaagatgatcttttggtctaatggatatgacattgattcttcatatcaataatatcggttcgattccggtaaagattataagaataaagaaaagaaagaaagaaggagatttatatataaaaagataggtattcattaattcacccccctgcgtgtgtgcgggggggcgggggtatatctaaaaatatatataaaagattataaaaaggaagaaagagttcagaagatttataataaaagagagaagagaatatggaattaatattattagtattaggttcaataggattaaatataatagatatctatataatgatagagatattgataatgggatgtacagtaaatagtatatgaataagtaatataaataatgatatgatagggttattgtatagtttaatacaaataataatagcaggaatagaatcagctataggattatcaatattagtaagttttaataaaataaggggatcagatgagatattaagaagtttataaaaaaatggtaaacgtaatagtattttcaacattaataggttcattaataagtggatttttaggaagatatatagggatattatgaagtcgtataatagtatgtacatcagtaataatgtcattattaggaacatatatattatattatgatgtaatggtattagataatgaatatagaaatataataatgagttgaataagtgtagattatttaaacatagattgaggatttttaatagataaagtatcaatatcagtattaataccagtagtaacaatatcaagtttagtacatttatatgcagtagtatatatgtcacatgatccacatcaacaaagattctttagttacttatcatttttcacatttggaatgatagtattagtaacaggagataacttattaatattatttttaggatgagaattaataggggtagcatcatatttattaatatcattttgatttactcgtatagcagcaggaaaatcaggattaaactcattattattaaatagatttggtgatacattctttgtaataggtttaggtttaacagtatacttagtaggaagtttaaattttgatacattatttagtttaaatggatacttatcaacagatatgttaacaataatattaatatgtatgttaataggttgtgcatcaaaaagtgtacaatttggattacatacatgattattaaatagtatggaaggtccaacaccagtatcatcattattacatgcagcttgtttagttatagcaggggtatacttattagtaagatgttcatatatagtagaatatagtccaatagctttaatattaatattagtattaggaggaataacaacattagtatctggattaatagcagttgtatcaaatgatataaaaaaaataatagcattatcaactatgagtcaattggctcgaaaatatatatcaaataaaataaaaaaattaaaagatttgataaatatttgaaatcaaactatatgcgttgatatcataatatataaaaatgagaattcgcagataaccaaaactcgttataaatattataacaatgtaaatatatttaaatcatcatccttatcaataaggtttttcaaattgaagttaaaagaatgaaaatatatatacataagtaagttagtaggaatctcagaggccatacgtttgatgttttataatatatataatatattaattataaataaaaaagaaactaataaagataaaaatagatatggtagtattaatacattaaatataaatacaactataaatagtaatatattattaaatactaataaagatagtaatatattattaaatagtaataaaaatagtagtatattaaatataaataaagatagtaatatattattaaatagtaataagaataatataaatgaattaaaagaatctttaaatatagaaaatgataagaattataatgaatgattatcaggagtaatagatggagatgggaatttaaatgtatcaaaagtagggagagtaaaattaataataacaatggaggaaagagataaaatgttattagaagatataaaatccaaattaggaggatccatatacaaagtaagtaatgggaaagcttatagataccaattatcaaatagaaaaggtttaatgaatttattattaagaataaatggattaataagaaacccaacaaggatgttacaattatcaaaagtatgtaatcattatgggttagaattaaaaatgccaaaagaattaacaaaagaaaatggatgatttagtggtttaatagatagtgatggttcaatatatataaacccaaaaataaaaagggtagagataacagtatctcaaaaaaatatatatttactagagatattacaaaaagtatatggagggaaaatatatccatcaaaaaaagaagcatttaaatatgaaatatataggaaattagaagtaaataatctagtagagaattattttaataaatatccattaagatcagcaaaaaaatataggttaagattaataaatgaagcacataaaaaattaagtaatttagatttaaataatccattaatattaaaagaatgaatagaatttaaagataagtgagataattataaaaaataagtaattaattaattaatagctgaaaatttaatcagtacataataagtttataaaaaatataaaaagtttagtttagtttagtttagtttaatttagtttagtttagatataagagatatatatataaaaatataaaataaagaaatggtccaaatatattttaaaagtcgaagattaagaaatataagcaagtagggataatgatgttaggagtaggaatatcagcatataatttagcaatataccatttaatatgtcatagtttctttaaagctttattatttatgtcagcgggagcgataatacatgcagtaatgaatgaatatcaagatatacgtacatatgggggattccataaattcttaccattatcatatatatgtatatttatagcatcattatcattaatggcattaccaggattaacaggatattattcaaaagatataataatagaatcattatatggatcatatacatttacaggatatataatatattgatttgcgatagcatcagcgacattaacatcagtatattcagtaaggttagtatattatgtattcttaaatacaccaaataatccaagatatgtatatatgcatttaaatgagaatccaatatttatgtatataccaatgataatattagcattatttagtatatttgtaggatatttagcgaaagatttatatttaggattaggtgcaacaatatataacagtatatttatacatccaaataatttaataatagtagatacagaatttagtttaagttcattaataaaattattacctttaataacatcaatagtattttcaacaatattattagtaatgtatgaattattttatgataaattatttatttataataatacatttataatgaatatatataatttctttaatcaaaaattatattatgatcaaatattaaataattatggtttcagatcatgattatatatctcatatttattaaatacttatgtagataaaggagttttaatcttcttaggtccttatggattatcagctttaaatttaagaatatctaatgcaataaataaattagttttctttaacttaggtttaatattagaattaatattctttagtatatttgtatttatattctttaatacttatacttacttatacataataatagctgtaatagtatttgtatttatttaaatataattataaataaataattgttaattaaaaataattaaatatataaaaaatatatatatatatatatatatatatataaagtaaagtaaagtataatgaaattatataataatatagataaagaaaaaatatttatataaatagtattaaataaaatagaataaataacaaaaacaagaaataaaagaaaaaatgccacaattagtaccatttttcttcttaaatacattattttatggatatataggattatttataatattattattagtatcatcaataatattaccttatatattaaaaataagtataataagaaatataatagtaaaattatagtatatatataaataaaaatataaatatatatatatataagtccataatttaataggttaaaatgtttccttgataaggaagatttagatgttcaagtcatcttggacttaagtatgtttctatagcttaacctggttaaagcaataaattgaagctttattgataaaagttcaaatctttttggaaacattaaaaagggtaaaaaaatgacgaaaaaattaattaaaaagtattaattagtaaaataaaaatttgtataatgcaattagtattagcaggaaaatatataggagctggaatagcaacaataggattaacaggagccggaataggaatagcaatagtattcgccgcattaataaacggaacatcaagaaacccaggattaagaaacacattattcccatttgccatattaggatttgccttgagtgaagctactggattattctgtttaatgatatcattcttattattatacggagtttaattaaatctttgattaaataagatataaataaatatatataaatatatatatatatatataaaatataaagagatataaaaatatataataagaataaaatagatagtatataatagataagtaaataagttagtatagtttaatttaattggtaaaaacgattatctaataagataataaaagtaagttcgagtcttactattaataaaagaagaaaatagattgaatataaagaagtaaagaagttagtatagtttaattggttaaaactattatataagtatataataaatgttaagttcgaatcttactattaataatagaacaatctgtaaaaaagtagaattatatcaatgggtataagagaaagtatcaaaaaaaaaaagaaaaagaaatgataaataatataaaattaataaaagttcccgccgggactgcgtgccgggcagaaataaatacattcgtaagtaaattacatatgactcctttaataaaagatagattaactttagtgttaatgagatatgaatactgtagagaaaataaattaaacagttatgattatatcttagaagaaataaataaaaaagactttaatagtcatttagtagaatttatagatggagatggtagtataaaaacaggaaaaagagtaggtcataaaaaaggatactatagaatagtaccaaatatagtaatagagttaatgtctagtgattgaagatatttagatttaataaaagaagtaacattaaatagagataaaaaagatccacaatgaactaaaaaaggagtaacattaaatataagttcaaaagaggatataaatttaatgatggagataatagatgaaaataatggatttttatctcaaaagaaatcaagaacttatgaaaattttaaagaattagtgaattatgtaaatactactcaatatgggatatcacatgatgaaatatgattaaataaaggaatggagatatgatcaaaagaattagaattagagaatagagagacaaaagaaaaagagttagattatataaataagaatataaatataaataaaataatgggatttatagaagcagaaggatcattagtgttacatcataataatacaaagaataatatatgaatatcttttgaaataactcaaaatacagagaatgatttaatactacatgggatattaaattatataaataatttaaatgataaatcattagtaaaagagaatatagaattagaatcaaaagggatagtatatgataaaggtaaatcaagaaaaaatcaattaagtcgtataagtataacaaataatgaatacttatattataaaataataccaatgttattaagtacaaatatgtatactaaaatgcaaataaatttagtatatttcatattaggtgtagtaatctgtaaagatttaaaaaatatacctgaatgtagagaattatatttaaaaataaaagaatcaatcaataccaatactgaaaaattattagatttaaatgagatattattaatattaaataaatatttataataaataaatatatatatatatatataaataatggaatatatatataatgttctataaatacccttagcacttgattttctactataaaagaaatctatatattttttataaggagataccattgaattaaagatcatacccaccaaataaagctttacgtataaaagcatcatctatacttgaagatattaaaggtatatttttagaaatctgtgttgtgtgaatgaaagtttcagaatagttccacctatagaaccctgagatcgtagattaaaaaataagaggacccagacaccgggatataaaaaagaaaaataaaatgaaaatgaataataaaataaatgaaattataattaaaaatgtaaataaaagtgagatagagataagagtagacgtaatctaccaggaagtgagagagaatcaagagtttcctaataatcaaaataatagttataaattaactaataaaaaatatctctatgataatagagaatgagaaaaaaataggaatagcttggatattaaattagaatttgatattgctagtaatgactataaaggattaatagaagatatgttaagtttaaaattagatgagaaagtatatcatttcttatttagatataacatatatggaaacataaaaagtaatgttgagatattagaggtaaaggattttttagatgaagagtattttagagagattgttgaaagacatttaaatgaaatattagaaaattatagtctagagattgatgctgataatgatcttaacatattagagatagaaatatctagtttaaaagcttgtataccattgttaggttgtgatgatttaggaattgttaataatttgctagacaaagatgttaatagtaaaagaagtgaattaggattgaaaactaaattatatatagatgaagtgtatagatatcatagagatgtacataaagaaaatttattagatgtaaatagtaatttaataaaagttagtttagaaaatagggtccccccctccactatttaaaagctagatgtatatatataaagtatcttaatattttttaataaaaactaattagcaacagttgagtagatacaaaataaaaattagtatataaaaaaaaaagtatataataataaagataagataagtagaaatggaaaattatataacataggtataattaataggagcgagagtaataaagagaaatataagatgtgtgaaaataaaaattttaacaaagttttattaatgaatgtagagagttttgtagattcaatggaaatgacttcattaataaaagaagaattattagctaaattaattaagtatgaatactgtagagaaaataatttaaatagttttgactataatacaaaggacctaaaggataatgaatttaatagtcatttagtaggatttatagatggagatggatatataaagacagggaaaagagtaggtcataaaaaaggatactatagaatagtaccacatataacaatagagttatcaaataaaaatgagagatatttaaacttaataataaaaaaaatattcttagagaataagaaagttcataatagaatagatagatctatagctgtaatagatatccgttcaaaggaagaattgaataagataatgggaataatagatggaaataatggatttatatcagaaaagaaatctaaggattatattaagtttaaagagttattgaattatttagatataactaaagaagaattacatggtgaagcctgagtaaataaaggaatggaaatatgatcagaaaatataatattagaagatagggaaacaagagagaaaggattaaattatataaataagaatttaacaataaattatttattaggatttatagaagcaaaaggattattaaaattacaaaaacaaaatgcgaataaatatatgaactcttttgaattaaaaagtactgataatgatttaatactagatggtatcctagaatttataaaaaattataaagatcctttatatatagtaaaagatatagatttaggagatcaaaaagtatcattaaaaaaatcaaaaaaaaatgtatgaagtagtttattaatagataatgaagatatattatattataaaataataccaatgttattaagtacaaatatgtatactaaaatggaactaaatttagtaaatttcatattaggtgtagtaatctgtaaatacttaaaggatatacctgaatgtaaaaaactttatataaaaataaaagattcaataactaataatgaattattgaacttaaatgaagtattattagtcttaaataaatatttaaaaaaataatcttatgtattacttacttttgaataaaaataaaaaaaataaataaatatatatatatatatagatagatagataaaaaaagaaatatataattatagatatatttatataataatataataaaaaaagagatgattatgacgaaataggtagacgtgtttagtttaggcctaaataattattggttcaagtccaattaatcataatataatataaagattgtctgaatagcttaattggtaaagcggtatactgttaatatatttgatttaggttcaagtcctgatttagactataggattgatggcagaatttggttattgcgtaatatttgaaatattattactttatagtagtgtgggttcaagtcctacttaatccgaagaatatatatggggaagatcttcaatgttggtagttgaagctgaactgtaaactcagtgatatttatcctcgtgtgttcaattcacactcttctcaaaaaaagaatagagaaggtaagttaagatgaaattacccaaactaaactagaaaaaaaagttcacatatatattcaaaaagaaagtataaatatatatatatatttatataaaaaaattatatatatataattaatatatatataaatcgagataattaatatagataataagaaataaaatattatttataaaatataattaaaaaagaaaaaaagagaagagaaaatgtttatagattttaatatattagatgtaacattaatagggtattatatcctaataagtacaacatcatttgaatcattagggatattagtagggacaataataccagtaataacagaattatgatttaatagttcacaattatttggtatattatatacattaatatatgtaggagcggtagtagtattatttgtatttatactatcagtattaaataaaaaagaagaatatgaacctcaatatagtagtttatttgtaatattattaatattatttttagatgatttagattataatgattcaaatgattgtgatataaatagtgtaaatatatatgaaaactttaatttattaaatatacataataattcagatttaacaacaataggtagtttaatatttacagaatattcatttatcttaatattaatagctttaatattattattaggaataataggaataatagtagtaataaaatcagaaaaaaatgaaaaataataaaatatttaatataaatatataataaaaaaaaatgaagtaaagaaaaaataatattaaatgaaaaagagaatattataagggataaaagaagtatttattattaaaaaagatatgaatataattaataaatttatttattcataaataataataagaaaaagaaattaaaaaagaaaaaggaaaaaagaagatgatatatacaataatagagatcttagaatcaatagaatatttattaatggcgataatatttatagtaggattattattaggagtagcctatttaacagtagctgaaagaaaaacgatggcttatatgcaaagaagattaggaccaaatgcggtaggatactatggggtattaatggcaatagctgatgcattaaaattattagtaaaagagatagtattagtacataatggggaatatatatatatgataggaggaccattaataacattatatgcagtattaataagttttggagtagtaccattaaatacaggattaggaataatagaaggagaatattcattaatattcttattaggatcaggatcattaggagtattaggtacagtaatagtaggatgaatgtcaaatagtaaatatacaatattagcatcagttcgtacaacagctcaattaataagttatgaattaatattaacaacaatagtatttataatagtattattagtaaactcattaaatatagaattagtaatagaaaaccaagtatatataaataatatagtaccattattaccattatgtataatatactttatagcagcattagcagaaacagctagaccaccatttgataatatagaagcagaatcagagttagtatcaggacatatgacagaattatcagcatcaccatttgttatattcttcttaagtgaatatacatcaatggtattaatgtcagtattaacagtaacattcttctttggaggttatttatcatgacctttagatatcaatagtatattatttatggatgtattacctcaaaataatttatactgatttatagaaggattaatatttagtgcattatttataatgaaaactaatttcttcttatttacttatatatgagtaagagcttcattccctagattaagattcgatttattaatcttattctgttgatatgtattattacctttattattcgctttatgtatatttattccttgtttattatttgcaggaaatggattatcattaatagtttaataaatatataatatatataatataatataatataatataatatatgtatataaatatatatatatatatatataatataaatgaattagttaattagttagtaattagttagttagttagtaattagtagtagtatgtatataaatatatatataataaatatatagttaaatatagttaaatatagtataattgattaattgattattaataaaaaaaaatatataaaaatatatttatatataaaattatatataaatataaatataaataataattatataataatataatatataatatagggggttatagtttaattggtagaacgattgctttgcaagcaatatatttgggttcgattcctgataactccactaaggatataggtataaggttctgtagcttaattggtttaagtatcattttgtcacaatgagggttgcctgttcgagtcaggtcagaatcgagaaggaaatttaatcattggtaagatgtgttatttgctatataattgaagagattctgtgtgggttcgattcctacaatttccgataaggtaggtatccttaatttaatggtaaaatattaaactacggatttaaatatattggttcaactccgataggatataaaagaagagagaaagagaaagggggaaagaaaagttagtttagtttatgatatatataaaagaagatatatgataaatagagaaagaaaaaggaatgttaaatttaatgtgaataaattttgtaggattatcagggataataggattaacaaagaatagaatattatcaataaaaggaaataaaaatatgataagtaaaagtatattaatattatgtatagcaagtttatatatagtaataaatgaattaaatagtataaatataaatgattatggatatttaagagtagtaaatgtattaaatatagattttggatatgatggaataggattaatattcttaatattaacaatatatttaggagtaataagtataatatcaaattgagaaaatataacagaaaaacgtggaacatatatgatattattaatgttattagtaatattaatgggattaaattttgtatgtttagatttaataagtttctatgtattatttgaaagtacattaataccattatatttaattataggaatatatggaggatcaaaaaaaaataaagcagcttattatgtattaatatatacattatgtagttcattatttatgttattatcaatagtattaatatatgtagtatacaataatgtagattatgtaacaataaatagtaaaataatatcaatagaattacaaagtgtattattaataggattaatgataggattaggagtaaaaacaccattagtaccagtacatacatgattaccaacagtacactcagaatcaccattagggggatcaatattattagcaggaataatattaaaattagcaatatatggaataataagaatattattatcaaatatatcagaaatatcattattatatgcaccaatattatatgtaataggaataataacaataatatatagtagtttagtaacattaagtcaaacagatttaaaagtaataatagcttatagttcaataagtcatttaggagtatgtatattaggaatatttgcaaataatttattaggaataataggatcattagtattatgtttagctcatggatttgtatcaccagctttatttatattaatgggaggagtattatatgatagatatcataatagggtattattctattatcaaggattaactcaatttatgccattatttgcagtatacttagtattctttagttttagtaatacaggtacaccattaagttataactttataggagaattcttatgtataacaggagcaataactaattatccagtaataggagttttagcagcatcatcagtattattatcagcatgttaccaaatgaaattaactaataaattaacttcaggtacattctctaaatacttatctgtaacttatgatttattatatagagaacactttatattattcttcttagctttacctacattagtattaggtatagtacctaactttataagtaatatattatacttatcttcaaatgctttaatatattcaatagtaatataataaaaaattaaagataatataaatataaatatttttataaatataaataaatatatatatatatatatatatagaatattaatgtatagtataatgtagtatataaaggtggttctttatttatttattaattaatatataggggaaaataactttataaaaatagagtatttataataattttatataataatatatatatatataatataaagagttaatgtttagtgttgaaggtcaacaagttaattgcaaattaactaaagtgagttcgattctcatctaagcataggggaactaaatattaatttatttataaatttatttataggaagtcattgtggtggaattggtagtcacaatacacttaaaatgtattgcttttaaaagcgtataagttcaagtcttatcaatgacaaaaaaagagagaatgagtcgtagactaataggtaagtcacttgcatttggggcaagctaataatagttcgaatctattcgattcaatgaagtgaaaaagagaagggaaagtagtttaaatggtaaaacgtttgacttttaatcaatttatattcggttcaagtccggtttttcctaactaagggaagtagctttataaaaaagagaagagaatggtaaatataatttaataggttagaatgaatacttgtggcgtatgtgatctgagttcaagtctcagtatttacccaaaaagttagtcagtcagtcagttagtcagtccccagatgggggagcagaaaagggatgtttagtaaagaaattaatatagtttaattggttaaaacgattgcctcatatgcaataaatgttaagttcgagtctttctattaataaagaacaatctgtaaaaaattagaattatatcaatgggtataagagaaagtataaaaaaaaagaaaaaagaaatgataaataaagtaatgaaatatatattaaaaagaaatataagggaaggattatcaaaaggattattaaaaatggagataaagaactgattagaattaataaatagaagtatatcaaaaagaataaataaagagataatattaagaaaaagattattattaagaataaataaattagagaaattaaatcatataaatgattataaattaataagttataattataataagaatggaatgatattaaaaagtataataagtaaattaataataagattattagaaaatataataaatggagtagatttaaaaaaagatggagaaagagtatcaaaaagtggtggaagtataataataagtaaaccagtaataaaagagaaattaaataaagtagaagtattattttattattttttaccaaataataaatcatataaaaatataagtagaataaatatgtttataaataaaataaaagattataaagaattagtattattaaataaagattataaaaaaggatcatatatattacaagaaaaagagatagtatcaaatataataaataatataatgtcaaatagaaataatgtaaaatatataaatactaatgtaaaaaatataataaataatttaagtataaatgagaaagaaaataaaaaatgaatgttattattaaaagaattattaaaaaaaaatatagaagaagtaggaaacttaccaaaagaagtaatgataaataaaacattatgaaatgtatcaaaattaatagaaaatgaaataaaaagtaatgaattaaaagaaatgaaaagagaaagtcaattattaagaatattaaaaagaaataatgatacaaatatattaaatatatacaataaagtattagatacaaataaattaatatgtggaataagtaatatacattcaaaaaatgaactattattagaaagaaaagatttaataaataattatttattaaaaaatgagatattattaaataaagtctccgctcccacaccaggtgcagaaagaaaaagtaatagaaacatattaaaaataaataattctaaattaaatgtaaatggatatatagtaagttatgtagatatattattaggtaaaataataaataaaggtacatcaaataatataaaaatgataataagtaaatactttggattaaaagaagtagaaataaaaggtataaatttaaaatatgaatttaataatccagaaatattattaaaattaataagaaaaggaatatcaaaaagacaaagaacattatcacgtatatttagatttagattaaaaaatagaataccactattaaatgataaaggtgtattaaaaaataaaatagcaaataatttattaaaaaatatgtctttaaataataatatattaaatgtagaaaataatataaaaaaagaattattattattaaatgaattaaataaatcaaataataatatctcttatattaataatgatataaaagattattataatcatttagatatggataataatttaactttaaataatgaaatattatataaaaatatagtaggttgatctttattattaaaaggtaaagtaggtgctagaaaaggtaaaaatagatctaatagaatcttaatgactaaaggttcatttaaaaataataatttatatatctataatatctttgatgaaacttcaaataataatggttactctaaagatagattaagattaaattatataaaaaatagtaatatcataaattatatggataaatcaactaataatggtaaactaggtataacattaaaagtaaatatattataaatcaatcaattaattaatcaatatatcttatattttatattatataaatataaccatatataaatataaataaatataatcatatataaatataaataaatatatatatatatatatatatatatatataaaatacctaataattaataaaaataaaaataaaagggtaaagaaataaaataaatatttaaataagaaagagaataagaaatatataataatataatatatataataatggaaaatcataaaaataaataaaagagaaggaagggaaaaatagagagaatgtagataagaaacgaaatggaagttaataagtatatatgtatataagaaacagatagagaccgaatggttaggtgccttttttgggtagaggaattagttagttcgattctagcctatctgaaagtataatatattatagtataatatagtataaaaggaggttaggttgtataattgataggctgggctgggctcttttagtttaattggttaaaacatattacttctaataatataattaacgttcgactcgttaaaggagctaaaagaaaaggaatttagttaaatggtataacatcagatttacactcttaagttaatggttcaactccattagttcctataataaatataaatatatataaataatatatatatatattaaaaaaaaagtatataataataaaaaaagaaaaagaatttaataaagaaaagagtatgatgtcggctcagattaagcgttatctaaggacataatacatgcgaataagactcaattaatgtataaaatatgttaataaagttgtgtaaaggtgagtaaaatattaaaatgtgaactattgtgatatatgaaatatatatgaaaggtgtcttcctttgggggggcataaataaagaagagatttgatgatagtccagttaatatgtggaataggtagtaggataaaatagagagattaacctagccatagatccatagtcaataatgaaagttataatgaccacattgatcttgaataaggtcaatataaaagatgtaatttagaaataaattgcatataatacagcagtaaggaatattagacaatgatcgaaagattga

SEQ ID NO: 21 - DNA, 33135 bp, Pichia kluyveri
  >NCYC246_000013F P_kluyveri_NCYC246_TS
ttcataataaacaccactggatctccacatcaagcatataatatcatcaaaaagaacatactttgttttttattacaccctccctgttgtacccatatcacactttacccttctaactcctccaatacgctaaaatatgcccatgttaaatctttaccactatattctacgctctctgttgcccatccaactctaaaaagtcaaaaaaaacaacataaaaaatacttcttccaactagtacatccatcaacacacatattcccaatgaaattcttcacttacctcccatgaaaaataaaaaatcatattttcaccccttcttttgcctccataaaatttacacagatactcctgaacaatccgattccaacgcactgggtctcgtgtcctcagcacgtctgtagcccgagaaaaaaggcctttttcattttgacatccataataccgcccgaaatcgaacactgtcggttgcggccatatctagcagaaagcaccgtttcccgtccgatcaactgtagttaagctgctaagagcctgaccgagtagtgtagtgggagaccatatgcgaaactcaggtgctgcaatctttttttttcatagtatttttcatagtagtgtattttcctgtggcgtattgcgtattattttttgcggcgcatttctctcgtggaggctcgtcacttttttacggaggctcatctttttcagaatttctcgccaattttccgaacccaattttgcggaggctcgtcacttttttacggaggctcatctttttcagaatttctcgccaaatttccgaacccaaaattccggaggctcgtcactttcaaaaatttctcaaatttccgaacccaattttgcggaggctcgtcacttttcaccacgcgcgccaattttccgaacccaattttccgctgcgccacaggcaccgcatgcgccactactgcctgcaccgccacccgccaccgccacatttttccacttttcgtcgagtcgaaaaaattgttttttctcacgagcccctcgacttttttcttatcgtacgctgctgagccgctatcagtgtgctgagccgccacgccaagccgccacgacaccactttcgttgtcttttggttatgtccgttatcaccttctgtttactatcttcttactcccgcagtcattctacacactacatatacctacatgcgcacaaaaattcaggcttcacacccataccctacactagtgcatacctgctctggttgtccagatataagcgttcaaagttagtcaaaaatcccatattttgacctctaggtgtaaaataaattactttcttaataatttccaaaaagtgcgttttttactttttagctcttttttcgggtcgttgcgtctctacatactaattttcgtgctacagccgtgcagtgaaaatttttcaccaccatatttccctaatttctgtgcgtcacttgcctctttgggacgttcccagcccttttttccccaaacccctctgtccgcacgtgattctttctccagagtcaactccctctgactcttcttctctttggttctttaatatgactctgtgtcttgacttctacttattcacgtgattgaatcactggagtcatctcacgtgttattgcgctcaccacttcataactaattcagtaatcaagtcttaattaactaagcacaagtctacaggtctatactaatctccactgtacatcttaagtaatcactacactacgtaatcataagtcttaatctccgcgggccactgtacgtcttatgtaatcactacactacgtaatcataagtcttaatctcctctgacatcatagctattctccttatgtaatcaataatccctaccctaccactctcctcccttacgtaagcataaatcccgtctgacattatttgaaaaaatcctaagtccaaaacaggtaaaatatgcctacccagacgatcgacccaaatccaccacccccgtcctcacgtataccatacaccaagccacggactaggaattaatggcacccaacagcatcgcccaccacccggccacgccggcatccccaaatctcgccgaaatacccagctcgcatctgcaaactgcaacttcgccgccgaagcaacaaatcggacaacagaggcttaatctcagcagatcgtaacaacaaggctactctactgcttacaataccccgttgtacatctaagtcgtatgcaaaggatttatcctcgcgcatcctgacattgccatccgccggcaagcacacgcagcctttccgccacgcgcaccgctgccgacctactacggttctgcgacacaagtgccttattcttatccttctcaaatgtgcgagggcaagtaatcgtcgcgttctagcatggattctgacttagaggcgttcagccattatccagcagatggtagcttcgcggcagtgtctgctcagacagccgcaaaaaccaattatctgaatgaacggttcctctcgtactaagttcaattactattgcgacaacattcatcagtagggtaaaactaacctgtctcacgacggtctaaacccagctcacgttccctattagtgggtgaacaatccaacgcttaccgaattctgcttcggtatgataggaagagccgacatcgaagaatcaaaaagcaatgtcgctatgagcgcttgactgccacaagccagttatccctgtggtaacttttctggcacctctagcctcaaattccgagggactaaaggatcgataggccacactttcatggtttgtattcacactgaaaatcaaaatcaaggggacttttacccttttgttctactggagatttctgttctccatgagtcccccttaggacatctgcgttatcgtttaacagatgtgccgccccagccaaactccccacctgacaatgtcatcaacccggatcggcacacaagatgccttcgcactagaacgtggtcgtcaagaccagctccgcttcattgaataagtaaaaaaacgataaaggtagtggtatttcactggcgccggagctcccacttatgctacaccctctatgtcttttcacaatgtcaaactagagtcaagctcaacagggtcttctttccccgctgattctgccaagcccgttcccttggctgtggtttcgctagatagtagatagggacagtgggaatctcgttaatccattcatgcgcgtcactaattagatgacgaggcatttggctaccttaagagagtcatagttactcccgccgtttacccgcgcttggttgaatttcttcactttgacattcagagcactgggcagaaatcacattgcgtcaacatcactttctgaccatcgcaatgctatgttttaattagacagtcagattccccttgtccgtaccagttctaagttggttgttaaccgtggaggccgcaagcgcaagcgtagctagcagcaccgcccccgaagaagcagcgccagcacgcatggccagcacaggaagcacatccacccaacccttagagccaatccttatcccgaagttacggatctattttgccgacttcccttatctacattattctatcaactagaggctgttaaccttggagacctgctgcggttatgagtacgacttggcgtgaaaactattccttcctgcggattttcaaggaccgtcgcaagcgcaccggacgtcgcaaacaaaggcgacgctcttccagccataagaccccctctccggataaaccaattccagggtgataagctgttaagaagaaaagaaaactcctcccagggctcccgccggcgtctccgcattctgttacgttgccgtgaagaatccacatccaagttccggaattttaaccggattccctttcgatggtggtgcaaagaattgcacacgttgaaacggagcttccccatctcttaggatcgactaacccgcgtccaactgctgttgacgcggaacctttccccacttcagtcttcaaagttctcatttgaatatttgctactaccaccaagatctgcactaggggccgttcgacccaggctcacgcccaaggcttcgtcacaaacccccacgcctgcctactcgccaaggcatcacgccatggcggcaaagtataggtaacacgcttgagcgccatccattttcagggctagttcattcggccggtgagttgttacacactccttagcggattccgacttccatggccaccgtccggctgtctggatgaactaacaccttttgtggtgtctgatgagcgtgcattccggcaccttaactttgcgttcggttcatcccgcatcgccagttctgcttaccaaaaatggcccactaaaagctctgcattcaaacgtccgcgttcaataaagcaacagggacttcttacatatttaaagtttgagaatacgctaaggtcatttcgaccccgagacgtctaatcattcgctttacctcataaaactgatacgagcttctgctatcctgagggaaacttcggcaggaaccagctactagatggttcgattagtctttcgcccctatacccaaattcgacgatcgatttgcacgtcagaaccgctacgagcctccaccagagtttcctctggcttcaccctattcaggcatagttcaccatctttcgggtcccaacagctatgctcttactcaaatccatccgataaacatcaggatcggtcgatcgtgcccgcccccgagagagcggtccgacctacgttcactttcattacgcgtacgggttttacacccaaacactcgcatagacgttagactccttggtccatgtttcaagacgggcggtattgcgccgttgtgccagcatccgagacgaaacgagtccgccgcagccctcggtccccatacgcagcatctacaaaaggctataacactccgaggagccacattccaattgtccttatcctgcaacgaaaaccgatgctggcccaggaaaaacccagagcgccgcccacgagaggcaacgatgcgtaaatcccatgtcgagcccaatacccttccctttcaacaatttcacgtgctgtttcactctcttttcaaagtgcttttcatctttccttcacagtacttgttcgctatcggtctctcgccaatatttagccttagatggaatttaccacccacttagagctgcattcccaaacaactcgactcgtcagaagggcctcacaggtgtcgacatgcacgatacggggctctcaccctcagtggcaccctgttccaagggacttgcacacacgtctaacccgagactccaacctgcaatttacaactcgcacactaggtgagatttcaaatctgagctcttgccgcttcactcgccgctactgaggcaatccctgttggtttcttttcctccgcttattgatatgcttaagttcagcgggtattcctacctgatctgaggtcgagcttagttaaaagttcggcggccaaagcgttccaataatttagttcacttcgtccacgacgttccatttcgaaaaaggcatagcctgttctcaactctgcttgcgcaagaaggaaacgacgctcagacaggcatgccccatggaataccatggggcgcaatgtgcgttcaagaactcgatgattcacgatggctgcaattcacactaggtatcgcatttcgctgcgctcttcatcgatgcgagaaccaagagatccgttgttgaaagttttgttttgttaaaacttagtgactggtattattacaattttaggtgtttggtgcgctcacgcatgtgtataagatataaatcacagtaatgatccttccgcaggttcacctacggaaaccttgttacgacttttacgacctctaaatgaccaagtttgactgaattttcagcgccatgggaaagttgcccctcccgcggcgccaatcttggagcctcactaagccattcaatcggtagtagcgacgggcggtgtgtacaaagggcagggacgtaatcaacgcaagctgatgacttgcgcttactaggaattcctcgttgaagagcaaaaattacaatgctctatccccagcacgacggagtttcacgagattacccgggcctctcgaccaaggatatacttgctggctccgtcagtgtagcgcgcgtgcggcccagaacgtctaagggcatcacagacctgttgttgcctcaaacttccatgggtttgaaacccatagtccctctaagaagagcccacgagcagatgctcgcagccctatttagcaggttaaggtctcgtccgttatcgcaattaagcagacaaatcactccaaggactaaaaacggccatgcaccaccacccgtaagatcaagagaagtctctagcttgtcaatccttattacgtctggacctggtgagtttccccgtgttgagtcaaattaagccgcaggctccactcctggtggtgcccttccgtcaattcctttaagtttcagccttgcaaccatactccccccagaacccaaagactttgatttctcgtaaggtgccgagtgggcaagaagcgccacccgatccctagtcggcatagtttatggttaagactacgacggtatctgatcatcttcgatcccctaactttcgttcttgattaatgaaaacgtccttggcaaatgctttcgcagtagttagtcttcagttaatccaagaatttcacctctgacaactgaatactgatgcccccgaccgtccctattaatcattacgatggtcctagaaaccaacaaaatagaaccataacgtcctattctattattccatgctaatatatccgagcaaaggcctgctttgaacactctaatttcctcaaagtaatcgtcctggttcactccgaagagttagccagaaggaaaagacccggccgcaacagtacttaccataggtagaccgcccgcccaggcccaaagttcaactacgagctttttaactgcaacaactttaatatacgctattggagctggaattaccgcggctgctggcaccagacttgccctccaattgttcctcgttaaggtatttacattgtactcattccaattacaagaccaatggccctgtatcgttatatattgtcactacctccctgtgtcaggattgggtaatttgcgcgcctgctgccttccttggatgtggtagccgtttctcaggctccctctccggaatcgaacccttattccccgttacccgtgaaaaccatggtaggcctctatcctaccatcgaaagttgatagggcagaaatttgaatgaaccagctccagcacaaaggccatgagcttcgaaaagttattatgaatcatcaaaaggcccgagggcattgattttttatctaataaatacacccctcccgaagtcggggctttacgcatgtattagctctagattttccacggttatccatgtagaacggaactatcaaataaacgataactgatttaatgagccattcgcagtttcaccgtataatgcttatacttagacatgcatggcttaatctttgagacaagcatatgactactggcaggatcaaccagataactacgctcagatgagttttgttatgatgattggattaacctacacatagcactgtttgactttcttcaacggaggtcccctgtacaaagtacagcttcgtccgcttcagtggagagtggtcccagatgtcacgtttgcacggctacatctccaaccccgtccccaataaacctagtggtccgctggctatcagctagcaacccaccggccccgtcagtgcgcaccacggtcgcaagaccacaatgcccctgtccaagacttgcgtctcttgtccccggccatacccaagcttgtccgtagacgcccctgcatactctccgtgggatcttggcctatcggtgcacaacaccgctaagaaccgcattttttaagtgcttttctcatgtatatcccccggactgcgtaatcttgccaaaaattcgcagcgcgcgttggccgcggcgtccaggagttaaattggacttcgttttggcgtgcaatgttttcgagcgcgaggtgaagtttttctttttgtcaatgctgctgagccgtcagccgtgcatgcatttctaacaaatcccattttgcaaacttgcccaatatgccttcctacaccttcataattacatggcacactatacagagcatcctgatcaacatatctttgtaactaagcaataggacagaaactaggaaattttgatgtgtgttttccttcactgggcactgcccatggaatgtaatacttgcccgacaaaaactttcaatcttcccagcgaatctcaaaatttaaaaaaaattcaaaactctcacagtctacttcccacgaaattcccacttcactgggcaacaataccaacaccccccgtaactcccctctcaggccggattttccaattccaatctctgttctctactctccctggcctcttgtacctcctaccactctcagaatcctgacttagtgattttgaaatttctcatattgggtttctacccggcagctgcccatgaaaaaatgtctactgggcaactccccagtgaacaccctcgctgtgcatttttctcactttgccaaaatttccagccaagtactcacacaatttgtctgcttgcccacgaagggcctcttcactgggcacagctccactgggcactcccagtcaacttgcccatgaaaccacttctctccagatgaactttggttttggccaatttccattatgcccatgttaaacactgctcctagagagtaaaacacgctgatcaaaactatctacaaggcatgtctctagctggcgtggttgtcgagatattcactgttgaacttggcactctactaacttcacctatttatttctccacaaccagtgcgtctttcgctttgataattttatttcataataaacaccactggatctccacatcaagcatataatatcatcaaaaagaacatactttgttttttattacaccctccctgttgtacccatatcacactttacccttctaactcctccaatacgctaaaatatgcccatgttaaatctttaccactatattctacgctctctgttgcccatccaactctaaaaagtcaaaaaaaacaacataaaaaatacttcttccaactagtacatccatcaacacacatattcccaatgaaattcttcacttacctcccatgaaaaataaaaaatcatattttcaccccttcttttgcctccataaaatttacacagatactcctgaacaatccgattccaacgcactgggtctcgtgtcctcagcacgtctgtagcccgagaaaaaaggcctttttcattttgacatccataataccgcccgaaatcgaacactgtcggttgcggccatatctagcagaaagcaccgtttcccgtccgatcaactgtagttaagctgctaagagcctgaccgagtagtgtagtgggagaccatatgcgaaactcaggtgctgcaatctttttttttcatagtatttttcatagtagtgtattttcctgtggcgtattgcgtattattttttgcggcgcatttctctcgtggaggctcgtcacttttttacggaggctcatctttttcagaatttctcgccaattttccgaacccaattttgcggaggctcgtcacttttttacggaggctcatctttttcagaatttctcgccaaatttccgaacccaaaattccggaggctcgtcactttcaaaaatttctcaaatttccgaacccaattttgcggaggctcgtcacttttcaccacgcgcgccaattttccgaacccaattttccgctgcgccacaggcaccgcatgcgccactactgcctgcaccgccacccgccaccgccacatttttccacttttcgtcgagtcgaaaaaattgttttttctcacgagcccctcgacttttttcttatcgtacgctgctgagccgctatcagtgtgctgagccgccacgccaagccgccacgacaccactttcgttgtcttttggttatgtccgttatcaccttctgtttactatcttcttactcccgcagtcattctacacactacatatacctacatgcgcacaaaaattcaggcttcacacccataccctacactagtgcatacctgctctggttgtccagatataagcgttcaaagttagtcaaaaatcccatattttgacctctaggtgtaaaataaattactttcttaataatttccaaaaagtgcgttttttactttttagctcttttttcgggtcgttgcgtctctacatactaattttcgtgctacagccgtgcagtgaaaatttttcaccaccatatttccctaatttctgtgcgtcacttgcctctttgggacgttcccagcccttttttccccaaacccctctgtccgcacgtgattctttctccagagtcaactccctctgactcttcttctctttggttctttaatatgactctgtgtcttgacttctacttattcacgtgattgaatcactggagtcatctcacgtgttattgcgctcaccacttcataactaattcagtaatcaagtcttaattaactaagcacaagtctacaggtctatactaatctccactgtacatcttaagtaatcactacactacgtaatcataagtcttaatctccgcgggccactgtacgtcttatgtaatcactacactacgtaatcataagtcttaatctcctctgacatcatagctattctccttatgtaatcaataatccctaccctaccactctcctcccttacgtaagcataaatcccgtctgacattatttgaaaaaatcctaagtccaaaacaggtaaaatatgcctacccagacgatcgacccaaatccaccacccccgtcctcacgtataccatacaccaagccacggactaggaattaatggcacccaacagcatcgcccaccacccggccacgccggcatccccaaatctcgccgaaatacccagctcgcatctgcaaactgcaacttcgccgccgaagcaacaaatcggacaacagaggcttaatctcagcagatcgtaacaacaaggctactctactgcttacaataccccgttgtacatctaagtcgtatgcaaaggatttatcctcgcgcatcctgacattgccatccgccggcaagcacacgcagcctttccgccacgcgcaccgctgccgacctactacggttctgcgacacaagtgccttattcttatccttctcaaatgtgcgagggcaagtaatcgtcgcgttctagcatggattctgacttagaggcgttcagccattatccagcagatggtagcttcgcggcagtgtctgctcagacagccgcaaaaaccaattatctgaatgaacggttcctctcgtactaagttcaattactattgcgacaacattcatcagtagggtaaaactaacctgtctcacgacggtctaaacccagctcacgttccctattagtgggtgaacaatccaacgcttaccgaattctgcttcggtatgataggaagagccgacatcgaagaatcaaaaagcaatgtcgctatgagcgcttgactgccacaagccagttatccctgtggtaacttttctggcacctctagcctcaaattccgagggactaaaggatcgataggccacactttcatggtttgtattcacactgaaaatcaaaatcaaggggacttttacccttttgttctactggagatttctgttctccatgagtcccccttaggacatctgcgttatcgtttaacagatgtgccgccccagccaaactccccacctgacaatgtcatcaacccggatcggcacacaagatgccttcgcactagaacgtggtcgtcaagaccagctccgcttcattgaataagtaaaaaaacgataaaggtagtggtatttcactggcgccggagctcccacttatgctacaccctctatgtcttttcacaatgtcaaactagagtcaagctcaacagggtcttctttccccgctgattctgccaagcccgttcccttggctgtggtttcgctagatagtagatagggacagtgggaatctcgttaatccattcatgcgcgtcactaattagatgacgaggcatttggctaccttaagagagtcatagttactcccgccgtttacccgcgcttggttgaatttcttcactttgacattcagagcactgggcagaaatcacattgcgtcaacatcactttctgaccatcgcaatgctatgttttaattagacagtcagattccccttgtccgtaccagttctaagttggttgttaaccgtggaggccgcaagcgcaagcgtagctagcagcaccgcccccgaagaagcagcgccagcacgcatggccagcacaggaagcacatccacccaacccttagagccaatccttatcccgaagttacggatctattttgccgacttcccttatctacattattctatcaactagaggctgttaaccttggagacctgctgcggttatgagtacgacttggcgtgaaaactattccttcctgcggattttcaaggaccgtcgcaagcgcaccggacgtcgcaaacaaaggcgacgctcttccagccataagaccccctctccggataaaccaattccagggtgataagctgttaagaagaaaagaaaactcctcccagggctcccgccggcgtctccgcattctgttacgttgccgtgaagaatccacatccaagttccggaattttaaccggattccctttcgatggtggtgcaaagaattgcacacgttgaaacggagcttccccatctcttaggatcgactaacccgcgtccaactgctgttgacgcggaacctttccccacttcagtcttcaaagttctcatttgaatatttgctactaccaccaagatctgcactaggggccgttcgacccaggctcacgcccaaggcttcgtcacaaacccccacgcctgcctactcgccaaggcatcacgccatggcggcaaagtataggtaacacgcttgagcgccatccattttcagggctagttcattcggccggtgagttgttacacactccttagcggattccgacttccatggccaccgtccggctgtctggatgaactaacaccttttgtggtgtctgatgagcgtgcattccggcaccttaactttgcgttcggttcatcccgcatcgccagttctgcttaccaaaaatggcccactaaaagctctgcattcaaacgtccgcgttcaataaagcaacagggacttcttacatatttaaagtttgagaatacgctaaggtcatttcgaccccgagacgtctaatcattcgctttacctcataaaactgatacgagcttctgctatcctgagggaaacttcggcaggaaccagctactagatggttcgattagtctttcgcccctatacccaaattcgacgatcgatttgcacgtcagaaccgctacgagcctccaccagagtttcctctggcttcaccctattcaggcatagttcaccatctttcgggtcccaacagctatgctcttactcaaatccatccgataaacatcaggatcggtcgatcgtgcccgcccccgagagagcggtccgacctacgttcactttcattacgcgtacgggttttacacccaaacactcgcatagacgttagactccttggtccatgtttcaagacgggcggtattgcgccgttgtgccagcatccgagacgaaacgagtccgccgcagccctcggtccccatacgcagcatctacaaaaggctataacactccgaggagccacattccaattgtccttatcctgcaacgaaaaccgatgctggcccaggaaaaacccagagcgccgcccacgagaggcaacgatgcgtaaatcccatgtcgagcccaatacccttccctttcaacaatttcacgtgctgtttcactctcttttcaaagtgcttttcatctttccttcacagtacttgttcgctatcggtctctcgccaatatttagccttagatggaatttaccacccacttagagctgcattcccaaacaactcgactcgtcagaagggcctcacaggtgtcgacatgcacgatacggggctctcaccctcagtggcaccctgttccaagggacttgcacacacgtctaacccgagactccaacctgcaatttacaactcgcacactaggtgagatttcaaatctgagctcttgccgcttcactcgccgctactgaggcaatccctgttggtttcttttcctccgcttattgatatgcttaagttcagcgggtattcctacctgatctgaggtcgagcttagttaaaagttcggcggccaaagcgttccaataatttagttcacttcgtccacgacgttccatttcgaaaaaggcatagcctgttctcaactctgcttgcgcaagaaggaaacgacgctcagacaggcatgccccatggaataccatggggcgcaatgtgcgttcaagaactcgatgattcacgatggctgcaattcacactaggtatcgcatttcgctgcgctcttcatcgatgcgagaaccaagagatccgttgttgaaagttttgttttgttaaaacttagtgactggtattattacaattttaggtgtttggtgcgctcacgcatgtgtataagatataaatcacagtaatgatccttccgcaggttcacctacggaaaccttgttacgacttttacgacctctaaatgaccaagtttgactgaattttcagcgccatgggaaagttgcccctcccgcggcgccaatcttggagcctcactaagccattcaatcggtagtagcgacgggcggtgtgtacaaagggcagggacgtaatcaacgcaagctgatgacttgcgcttactaggaattcctcgttgaagagcaaaaattacaatgctctatccccagcacgacggagtttcacgagattacccgggcctctcgaccaaggatatacttgctggctccgtcagtgtagcgcgcgtgcggcccagaacgtctaagggcatcacagacctgttgttgcctcaaacttccatgggtttgaaacccatagtccctctaagaagagcccacgagcagatgctcgcagccctatttagcaggttaaggtctcgtccgttatcgcaattaagcagacaaatcactccaaggactaaaaacggccatgcaccaccacccgtaagatcaagagaagtctctagcttgtcaatccttattacgtctggacctggtgagtttccccgtgttgagtcaaattaagccgcaggctccactcctggtggtgcccttccgtcaattcctttaagtttcagccttgcaaccatactccccccagaacccaaagactttgatttctcgtaaggtgccgagtgggcaagaagcgccacccgatccctagtcggcatagtttatggttaagactacgacggtatctgatcatcttcgatcccctaactttcgttcttgattaatgaaaacgtccttggcaaatgctttcgcagtagttagtcttcagttaatccaagaatttcacctctgacaactgaatactgatgcccccgaccgtccctattaatcattacgatggtcctagaaaccaacaaaatagaaccataacgtcctattctattattccatgctaatatatccgagcaaaggcctgctttgaacactctaatttcctcaaagtaatcgtcctggttcactccgaagagttagccagaaggaaaagacccggccgcaacagtacttaccataggtagaccgcccgcccaggcccaaagttcaactacgagctttttaactgcaacaactttaatatacgctattggagctggaattaccgcggctgctggcaccagacttgccctccaattgttcctcgttaaggtatttacattgtactcattccaattacaagaccaatggccctgtatcgttatatattgtcactacctccctgtgtcaggattgggtaatttgcgcgcctgctgccttccttggatgtggtagccgtttctcaggctccctctccggaatcgaacccttattccccgttacccgtgaaaaccatggtaggcctctatcctaccatcgaaagttgatagggcagaaatttgaatgaaccagctccagcacaaaggccatgagcttcgaaaagttattatgaatcatcaaaaggcccgagggcattgattttttatctaataaatacacccctcccgaagtcggggctttacgcatgtattagctctagattttccacggttatccatgtagaacggaactatcaaataaacgataactgatttaatgagccattcgcagtttcaccgtataatgcttatacttagacatgcatggcttaatctttgagacaagcatatgactactggcaggatcaaccagataactacgctcagatgagttttgttatgatgattggattaacctacacatagcactgtttgactttcttcaacggaggtcccctgtacaaagtacagcttcgtccgcttcagtggagagtggtcccagatgtcacgtttgcacggctacatctccaaccccgtccccaataaacctagtggtccgctggctatcagctagcaacccaccggccccgtcagtgcgcaccacggtcgcaagaccacaatgcccctgtccaagacttgcgtctcttgtccccggccatacccaagcttgtccgtagacgcccctgcatactctccgtgggatcttggcctatcggtgcacaacaccgctaagaaccgcattttttaagtgcttttctcatgtatatcccccggactgcgtaatcttgccaaaaattcgcagcgcgcgttggccgcggcgtccaggagttaaattggacttcgttttggcgtgcaatgttttcgagcgcgaggtgaagtttttcttttgtcaatgctgctgagccgtcagccgtgcatgcatttctaacaaatcccattttgcaaacttgcccaatatgccttcctacaccttcataattacatggcacactatacagagcatcctgatcaacatatctttgtaactaagcaataggacagaaactaggaaattttgatgtgtgttttccttcactgggcactgcccatggaatgtaatacttgcccgacaaaaactttcaatcttcccagcgaatctcaaaatttaaaaaaaattcaaaactctcacagtctacttcccacgaaattcccacttcactgggcaacaataccaacaccccccgtaactcccctctcaggccggattttccaattccaatctctgttctctactctccctggcctcttgtacctcctaccactctcagaatcctgacttagtgattttgaaatttctcatattgggtttctacccggcagctgcccatgaaaaaatgtctactgggcaactccccagtgaacaccctcgctgtgcatttttctcactttgccaaaatttccagccaagtactcacacaatttgtctgcttgcccacgaagggcctcttcactgggcacagctccactgggcactcccagtcaacttgcccatgaaaccacttctctccagatgaactttggttttggccaatttccattatgcccatgttaaacactgctcctagagagtaaaacacgctgatcaaaactatctacaaggcatgtctctagctggcgtggttgtcgagatattcactgttgaacttggcactctactaacttcacctatttatttctccacaaccagtgcgtctttcgctttgataattttatttcataataaacaccactggatctccacatcaagcatataatatcatcaaaaagaacatactttgttttttattacaccctccctgttgtacccatatcacactttacccttctaactcctccaatacgctaaaatatgcccatgttaaatctttaccactatattctacgctctctgttgcccatccaactctaaaaagtcaaaaaaaacaacataaaaaatacttcttccaactagtacatccatcaacacacatattcccaatgaaattcttcacttacctcccatgaaaaataaaaaatcatattttcaccccttcttttgcctccataaaatttacacagatactcctgaacaatccgattccaacgcactgggtctcgtgtcctcagcacgtctgtagcccgagaaaaaaggcctttttcattttgacatccataataccgcccgaaatcgaacactgtcggttgcggccatatctagcagaaagcaccgtttcccgtccgatcaactgtagttaagctgctaagagcctgaccgagtagtgtagtgggagaccatatgcgaaactcaggtgctgcaatctttttttttcatagtatttttcatagtagtgtattttcctgtggcgtattgcgtattattttttgcggcgcatttctctcgtggaggctcgtcacttttttacggaggctcatctttttcagaatttctcgccaattttccgaacccaattttgcggaggctcgtcacttttttacggaggctcatctttttcagaatttctcgccaaatttccgaacccaaaattccggaggctcgtcactttcaaaaatttctcaaatttccgaacccaattttgcggaggctcgtcacttttcaccacgcgcgccaattttccgaacccaattttccgctgcgccacaggcaccgcatgcgccactactgcctgcaccgccacccgccaccgccacatttttccacttttcgtcgagtcgaaaaaattgttttttctcacgagcccctcgacttttttcttatcgtacgctgctgagccgctatcagtgtgctgagccgccacgccaagccgccacgacaccactttcgttgtcttttggttatgtccgttatcaccttctgtttactatcttcttactcccgcagtcattctacacactacatatacctacatgcgcacaaaaattcaggcttcacacccataccctacactagtgcatacctgctctggttgtccagatataagcgttcaaagttagtcaaaaatcccatattttgacctctaggtgtaaaataaattactttcttaataatttccaaaaagtgcgttttttactttttagctcttttttcgggtcgttgcgtctctacatactaattttcgtgctacagccgtgcagtgaaaatttttcaccaccatatttccctaatttctgtgcgtcacttgcctctttgggacgttcccagcccttttttccccaaacccctctgtccgcacgtgattctttctccagagtcaactccctctgactcttcttctctttggttctttaatatgactctgtgtcttgacttctacttattcacgtgattgaatcactggagtcatctcacgtgttattgcgctcaccacttcataactaattcagtaatcaagtcttaattaactaagcacaagtctacaggtctatactaatctccactgtacatcttaagtaatcactacactacgtaatcataagtcttaatctccgcgggccactgtacgtcttatgtaatcactacactacgtaatcataagtcttaatctcctctgacatcatagctattctccttatgtaatcaataatccctaccctaccactctcctcccttacgtaagcataaatcccgtctgacattatttgaaaaaatcctaagtccaaaacaggtaaaatatgcctacccagacgatcgacccaaatccaccacccccgtcctcacgtataccatacaccaagccacggactaggaattaatggcacccaacagcatcgcccaccacccggccacgccggcatccccaaatctcgccgaaatacccagctcgcatctgcaaactgcaacttcgccgccgaagcaacaaatcggacaacagaggcttaatctcagcagatcgtaacaacaaggctactctactgcttacaataccccgttgtacatctaagtcgtatgcaaaggatttatcctcgcgcatcctgacattgccatccgccggcaagcacacgcagcctttccgccacgcgcaccgctgccgacctactacggttctgcgacacaagtgccttattcttatccttctcaaatgtgcgagggcaagtaatcgtcgcgttctagcatggattctgacttagaggcgttcagccattatccagcagatggtagcttcgcggcagtgtctgctcagacagccgcaaaaaccaattatctgaatgaacggttcctctcgtactaagttcaattactattgcgacaacattcatcagtagggtaaaactaacctgtctcacgacggtctaaacccagctcacgttccctattagtgggtgaacaatccaacgcttaccgaattctgcttcggtatgataggaagagccgacatcgaagaatcaaaaagcaatgtcgctatgagcgcttgactgccacaagccagttatccctgtggtaacttttctggcacctctagcctcaaattccgagggactaaaggatcgataggccacactttcatggtttgtattcacactgaaaatcaaaatcaaggggacttttacccttttgttctactggagatttctgttctccatgagtcccccttaggacatctgcgttatcgtttaacagatgtgccgccccagccaaactccccacctgacaatgtcatcaacccggatcggcacacaagatgccttcgcactagaacgtggtcgtcaagaccagctccgcttcattgaataagtaaaaaaacgataaaggtagtggtatttcactggcgccggagctcccacttatgctacaccctctatgtcttttcacaatgtcaaactagagtcaagctcaacagggtcttctttccccgctgattctgccaagcccgttcccttggctgtggtttcgctagatagtagatagggacagtgggaatctcgttaatccattcatgcgcgtcactaattagatgacgaggcatttggctaccttaagagagtcatagttactcccgccgtttacccgcgcttggttgaatttcttcactttgacattcagagcactgggcagaaatcacattgcgtcaacatcactttctgaccatcgcaatgctatgttttaattagacagtcagattccccttgtccgtaccagttctaagttggttgttaaccgtggaggccgcaagcgcaagcgtagctagcagcaccgcccccgaagaagcagcgccagcacgcatggccagcacaggaagcacatccacccaacccttagagccaatccttatcccgaagttacggatctattttgccgacttcccttatctacattattctatcaactagaggctgttaaccttggagacctgctgcggttatgagtacgacttggcgtgaaaactattccttcctgcggattttcaaggaccgtcgcaagcgcaccggacgtcgcaaacaaaggcgacgctcttccagccataagaccccctctccggataaaccaattccagggtgataagctgttaagaagaaaagaaaactcctcccagggctcccgccggcgtctccgcattctgttacgttgccgtgaagaatccacatccaagttccggaattttaaccggattccctttcgatggtggtgcaaagaattgcacacgttgaaacggagcttccccatctcttaggatcgactaacccgcgtccaactgctgttgacgcggaacctttccccacttcagtcttcaaagttctcatttgaatatttgctactaccaccaagatctgcactaggggccgttcgacccaggctcacgcccaaggcttcgtcacaaacccccacgcctgcctactcgccaaggcatcacgccatggcggcaaagtataggtaacacgcttgagcgccatccattttcagggctagttcattcggccggtgagttgttacacactccttagcggattccgacttccatggccaccgtccggctgtctggatgaactaacaccttttgtggtgtctgatgagcgtgcattccggcaccttaactttgcgttcggttcatcccgcatcgccagttctgcttaccaaaaatggcccactaaaagctctgcattcaaacgtccgcgttcaataaagcaacagggacttcttacatatttaaagtttgagaatacgctaaggtcatttcgaccccgagacgtctaatcattcgctttacctcataaaactgatacgagcttctgctatcctgagggaaacttcggcaggaaccagctactagatggttcgattagtctttcgcccctatacccaaattcgacgatcgatttgcacgtcagaaccgctacgagcctccaccagagtttcctctggcttcaccctattcaggcatagttcaccatctttcgggtcccaacagctatgctcttactcaaatccatccgataaacatcaggatcggtcgatcgtgcccgcccccgagagagcggtccgacctacgttcactttcattacgcgtacgggttttacacccaaacactcgcatagacgttagactccttggtccatgtttcaagacgggcggtattgcgccgttgtgccagcatccgagacgaaacgagtccgccgcagccctcggtccccatacgcagcatctacaaaaggctataacactccgaggagccacattccaattgtccttatcctgcaacgaaaaccgatgctggcccaggaaaaacccagagcgccgcccacgagaggcaacgatgcgtaaatcccatgtcgagcccaatacccttccctttcaacaatttcacgtgctgtttcactctcttttcaaagtgcttttcatctttccttcacagtacttgttcgctatcggtctctcgccaatatttagccttagatggaatttaccacccacttagagctgcattcccaaacaactcgactcgtcagaagggcctcacaggtgtcgacatgcacgatacggggctctcaccctcagtggcaccctgttccaagggacttgcacacacgtctaacccgagactccaacctgcaatttacaactcgcacactaggtgagatttcaaatctgagctcttgccgcttcactcgccgctactgaggcaatccctgttggtttcttttcctccgcttattgatatgcttaagttcagcgggtattcctacctgatctgaggtcgagcttagttaaaagttcggcggccaaagcgttccaataatttagttcacttcgtccacgacgttccatttcgaaaaaggcatagcctgttctcaactctgcttgcgcaagaaggaaacgacgctcagacaggcatgccccatggaataccatggggcgcaatgtgcgttcaagaactcgatgattcacgatggctgcaattcacactaggtatcgcatttcgctgcgctcttcatcgatgcgagaaccaagagatccgttgttgaaagttttgttttgttaaaacttagtgactggtattattacaattttaggtgtttggtgcgctcacgcatgtgtataagatataaatcacagtaatgatccttccgcaggttcacctacggaaaccttgttacgacttttacgacctctaaatgaccaagtttgactgaattttcagcgccatgggaaagttgcccctcccgcggcgccaatcttggagcctcactaagccattcaatcggtagtagcgacgggcggtgtgtacaaagggcagggacgtaatcaacgcaagctgatgacttgcgcttactaggaattcctcgttgaagagcaaaaattacaatgctctatccccagcacgacggagtttcacgagattacccgggcctctcgaccaaggatatacttgctggctccgtcagtgtagcgcgcgtgcggcccagaacgtctaagggcatcacagacctgttgttgcctcaaacttccatgggtttgaaacccatagtccctctaagaagagcccacgagcagatgctcgcagccctatttagcaggttaaggtctcgtccgttatcgcaattaagcagacaaatcactccaaggactaaaaacggccatgcaccaccacccgtaagatcaagagaagtctctagcttgtcaatccttattacgtctggacctggtgagtttccccgtgttgagtcaaattaagccgcaggctccactcctggtggtgcccttccgtcaattcctttaagtttcagccttgcaaccatactccccccagaacccaaagactttgatttctcgtaaggtgccgagtgggcaagaagcgccacccgatccctagtcggcatagtttatggttaagactacgacggtatctgatcatcttcgatcccctaactttcgttcttgattaatgaaaacgtccttggcaaatgctttcgcagtagttagtcttcagttaatccaagaatttcacctctgacaactgaatactgatgcccccgaccgtccctattaatcattacgatggtcctagaaaccaacaaaatagaaccataacgtcctattctattattccatgctaatatatccgagcaaaggcctgctttgaacactctaatttcctcaaagtaatcgtcctggttcactccgaagagttagccagaaggaaaagacccggccgcaacagtacttaccataggtagaccgcccgcccaggcccaaagttcaactacgagctttttaactgcaacaactttaatatacgctattggagctggaattaccgcggctgctggcaccagacttgccctccaattgttcctcgttaaggtatttacattgtactcattccaattacaagaccaatggccctgtatcgttatatattgtcactacctccctgtgtcaggattgggtaatttgcgcgcctgctgccttccttggatgtggtagccgtttctcaggctccctctccggaatcgaacccttattccccgttacccgtgaaaaccatggtaggcctctatcctaccatcgaaagttgatagggcagaaatttgaatgaaccagctccagcacaaaggccatgagcttcgaaaagttattatgaatcatcaaaaggcccgagggcattgattttttatctaataaatacacccctcccgaagtcggggctttacgcatgtattagctctagattttccacggttatccatgtagaacggaactatcaaataaacgataactgatttaatgagccattcgcagtttcaccgtataatgcttatacttagacatgcatggcttaatctttgagacaagcatatgactactggcaggatcaaccagataactacgctcagatgagttttgttatgatgattggattaacctacacatagcactgtttgactttcttcaacggaggtcccctgtacaaagtacagcttcgtccgcttcagtggagagtggtcccagatgtcacgtttgcacggctacatctccaaccccgtccccaataaacctagtggtccgctggctatcagctagcaacccaccggccccgtcagtgcgcaccacggtcgcaagaccacaatgcccctgtccaagacttgcgtctcttgtccccggccatacccaagcttgtccgtagacgcccctgcatactctccgtgggatcttggcctatcggtgcacaacaccgctaagaaccgcattttttaagtgcttttctcatgtatatcccccggactgcgtaatcttgccaaaaattcgcagcgcgcgttggccgcggcgtccaggagttaaattggacttcgttttggcgtgcaatgttttcgagcgcgaggtgaagttttttttttcaatgctgctgagccgtcagccgtgcatgcatttctaacaaatcccattttgcaaacttgcccaatatgccttcctacaccttcataattacatggcacactatacagagcatcctgatcaacatatctttgtaactaagcaataggacagaaactaggaaattttgatgtgtgttttccttcactgggcactgcccatggaatgtaatacttgcccgacaaaaactttcaatcttcccagcgaatctcaaaatttaaaaaaattcaaaactctcacagtctacttcccacgaaattcccacttcactgggcaacaataccaacaccccccgtaactcccctctcaggccggattttccaattccaatctctgttctctactctccctggcctcttgtacctcctaccactctcagaatcctgacttagtgattttgaaatttctcatattgggtttctacccggcagctgcccatgaaaaaatgtctactgggcaactccccagtgaacaccctcgctgtgcatttttctcactttgccaaaatttccagccaagtactcacacaatttgtctgcttgcccacgaagggcctcttcactgggcacagctccactgggcactcccagtcaacttgcccatgaaaccacttctctccagatgaactttggttttggccaatttccattatgcccatgttaaacactgctcctagagagtaaaacacgctgatcaaaactatctacaaggcatgtctctagctggcgtggttgtcgagatattcactgttgaacttggcactctactaacttcacctatttatttctccacaaccagtgcgtctttcgctttgataattttatttcataataaacaccactggatctccacatcaagcatataatatcatcaaaaagaacatactttgttttttattacaccctccctgttgtacccatatcacactttacccttctaactcctccaatacgctaaaatatgcccatgttaaatctttaccactatattctacgctctctgttgcccatccaactctaaaaagtcaaaaaaaacaacataaaaaatacttcttccaactagtacatccatcaacacacatattcccaatgaaattcttcacttacctcccatgaaaaataaaaaatcatattttcaccccttcttttgcctccataaaatttacacagatactcctgaacaatccgattccaacgcactgggtctcgtgtcctcagcacgtctgtagcccgagaaaaaaggcctttttcattttgacatccataataccgcccgaaatcgaacactgtcggttgcggccatatctagcagaaagcaccgtttcccgtccgatcaactgtagttaagctgctaagagcctgaccgagtagtgtagtgggagaccatatgcgaaactcaggtgctgcaatctttttttttcatagtatttttcatagtagtgtattttcctgtggcgtattgcgtattattttttgcggcgcatttctctcgtggaggctcgtcacttttttacggaggctcatctttttcagaatttctcgccaattttccgaacccaattttgcggaggctcgtcacttttttacggaggctcatctttttcagaatttctcgccaaatttccgaacccaaaattccggaggctcgtcactttcaaaaatttctcaaatttccgaacccaattttgcggaggctcgtcacttttcaccacgcgcgccaattttccgaacccaattttccgctgcgccacaggcaccgcatgcgccactactgcctgcaccgccacccgccaccgccacatttttccacttttcgtcgagtcgaaaaaattgttttttctcacgagcccctcgacttttttcttatcgtacgctgctgagccgctatcagtgtgctgagccgccacgccaagccgccacgacaccactttcgttgtcttttggttatgtccgttatcaccttctgtttactatcttcttactcccgcagtcattctacacactacatatacctacatgcgcacaaaaattcaggcttcacacccataccctacactagtgcatacctgctctggttgtccagatataagcgttcaaagttagtcaaaaatcccatattttgacctctaggtgtaaaataaattactttcttaataatttccaaaaagtgcgttttttactttttagctcttttttcgggtcgttgcgtctctacatactaattttcgtgctacagccgtgcagtgaaaatttttcaccaccatatttccctaatttctgtgcgtcacttgcctctttgggacgttcccagcccttttttccccaaacccctctgtccgcacgtgattctttctccagagtcaactccctctgactcttcttctctttggttctttaatatgactctgtgtcttgacttctacttattcacgtgattgaatcactggagtcatctcacgtgttattgcgctcaccacttcataactaattcagtaatcaagtcttaattaactaagcacaagtctacaggtctatactaatctccactgtacatcttaagtaatcactacactacgtaatcataagtcttaatctccgcgggccactgtacgtcttatgtaatcactacactacgtaatcataagtcttaatctcctctgacatcatagctattctccttatgtaatcaataatccctaccctaccactctcctcccttacgtaagcataaatcccgtctgacattatttgaaaaaatcctaagtccaaaacaggtaaaatatgcctacccagacgatcgacccaaatccaccacccccgtcctcacgtataccatacaccaagccacggactaggaattaatggcacccaacagcatcgcccaccacccggccacgccggcatccccaaatctcgccgaaatacccagctcgcatctgcaaactgcaacttcgccgccgaagcaacaaatcggacaacagaggcttaatctcagcagatcgtaacaacaaggctactctactgcttacaataccccgttgtacatctaagtcgtatgcaaaggatttatcctcgcgcatcctgacattgccatccgccggcaagcacacgcagcctttccgccacgcgcaccgctgccgacctactacggttctgcgacacaagtgccttattcttatccttctcaaatgtgcgagggcaagtaatcgtcgcgttctagcatggattctgacttagaggcgttcagccattatccagcagatggtagcttcgcggcagtgtctgctcagacagccgcaaaaaccaattatctgaatgaacggttcctctcgtactaagttcaattactattgcgacaacattcatcagtagggtaaaactaacctgtctcacgacggtctaaacccagctcacgttccctattagtgggtgaacaatccaacgcttaccgaattctgcttcggtatgataggaagagccgacatcgaagaatcaaaaagcaatgtcgctatgagcgcttgactgccacaagccagttatccctgtggtaacttttctggcacctctagcctcaaattccgagggactaaaggatcgataggccacactttcatggtttgtattcacactgaaaatcaaaatcaaggggacttttacccttttgttctactggagatttctgttctccatgatgagtcccccttaggacatctgcgttatcgtttaacagatgtgccgccccagccaaactccccacctgacaatgtcatcaacccggatcggcacacaagatgccttcgcactagaacgtggtcgtcaagaccagctccgcttcattgaataagtaaaaaaacgataaaggtagtggtatttcactggcgccggagctcccacttatgctacaccctctatgtcttttcacaatgtcaaactagagtcaagctcaacagggtcttctttccccgctgattctgccaagcccgttcccttggctgtggtttcgctagatagtagatagggacagtgggaatctcgttaatccattcatgcgcgtcactaattagatgacgaggcatttggctaccttaagagagtcatagttactcccgccgtttacccgcgcttggttgaatttcttcactttgacattcagagcactgggcagaaatcacattgcgtcaacatcactttctgaccatcgcaatgctatgttttaattagacagtcagattccccttgtccgtaccagttctaagttggttgttaaccgtggaggccgcaagcgcaagcgtagctagcagcaccgcccccgaagaagcagcgccagcacgcatggccagcacaggaagcacatccacccaacccttagagccaatccttatcccgaagttacggatctattttgccgacttcccttatctacattattctatcaactagaggctgttaaccttggagacctgctgcggttatgagtacgacttggcgtgaaaactattccttcctgcggattttcaaggaccgtcgcaagcgcaccggacgtcgcaaacaaaggcgacgctcttccagccataagaccccctctccggataaaccaattccagggtgataagctgttaagaagaaaagaaaactcctcccagggctcccgccggcgtctccgcattctgttacgttgccgtgaagaatccacatccaagttccggaattttaaccggattccctttcgatggtggtgcaaagaattgcacacgttgaaacggagcttccccatctcttaggatcgactaacccgcgtccaactgctgttgacgcggaacctttccccacttcagtcttcaaagttctcatttgaatatttgctactaccaccaagatctgcactaggggccgttcgacccaggctcacgcccaaggcttcgtcacaaacccccacgcctgcctactcgccaaggcatcacgccatggcggcaaagtataggtaacacgcttgagcgccatccattttcagggctagttcattcggccggtgagttgttacacactccttagcggattccgacttccatggccaccgtccggctgtctggatgaactaacaccttttgtggtgtctgatgagcgtgcattccggcaccttaactttgcgttcggttcatcccgcatcgccagttctgcttaccaaaaatggcccactaaaagctctgcattcaaacgtccgcgttcaataaagcaacagggacttcttacatatttaaagtttgagaatacgctaaggtcatttcgaccccgagacgtctaatcattcgctttacctcataaaactgatacgagcttctgctatcctgagggaaacttcggcaggaaccagctactagatggttcgattagtctttcgcccctatacccaaattcgacgatcgatttgcacgtcagaaccgctacgagcctccaccagagtttcctctggcttcaccctattcaggcatagttcaccatctttcgggtcccaacagctatgctcttactcaaatccatccgataaacatcaggatcggtcgatcgtgcccgcccccgagagagcggtccgacctacgttcactttcattacgcgtacgggttttacacccaaacactcgcatagacgttagactccttggtccatgtttcaagacgggcggtattgcgccgttgtgccagcatccgagacgaaacgagtccgccgcagccctcggtccccatacgcagcatctacaaaaggctataacactccgaggagccacattccaattgtccttatcctgcaacgaaaaccgatgctggcccaggaaaaacccagagcgccgcccacgagaggcaacgatgcgtaaatcccatgtcgagcccaatacccttccctttcaacaatttcacgtgctgtttcactctcttttcaaagtgcttttcatctttccttcacagtacttgttcgctatcggtctctcgccaatatttagccttagatggaatttaccacccacttagagctgcattcccaaacaactcgactcgtcagaagggcctcacaggtgtcgacatgcacgatacggggctctcaccctcagtggcaccctgttccaagggacttgcacacacgtctaacccgagactccaacctgcaatttacaactcgcacactaggtgagatttcaaatctgagctcttgccgcttcactcgccgctactgaggcaatccctgttggtttcttttcctccgcttattgatatgcttaagttcagcgggtattcctacctgatctgaggtcgagcttagttaaaagttcggcggccaaagcgttccaataatttagttcacttcgtccacgacgttccatttcgaaaaaggcatagcctgttctcaactctgcttgcgcaagaaggaaacgacgctcagacaggcatgccccatggaataccatggggcgcaatgtgcgttcaagaactcgatgattcacgatggctgcaattcacactaggtatcgcatttcgctgcgctcttcatcgatgcgagaaccaagagatccgttgttgaaagttttgttttgttaaaacttagtgactggtattattacaattttaggtgtttggtgcgctcacgcatgtgtataagatataaatcacagtaatgatccttccgcaggttcacctacggaaaccttgttacgacttttacgacctctaaatgaccaagtttgactgaattttcagcgccatgggaaagttgcccctcccgcggcgccaatcttggagcctcactaagccattcaatcggtagtagcgacgggcggtgtgtacaaagggcagggacgtaatcaacgcaagctgatgacttgcgcttactaggaattcctcgttgaagagcaaaattacaatgctctatccccagcacgacggagtttcacgagattacccgggcctctcgaccaaggatatacttgctggctccgtcagtgtagcgcgcgtgcggcccagaacgtctaagg
